(19) United States
(12) Patent Application Publication
(10) Pub. No.: US 2011/0293619 A1
(43) Pub. Date: Dec. 1, 2011

(54) CROSS-SPECIES-SPECIFIC PSMAxCD3 BISPECIFIC SINGLE CHAIN ANTIBODY

(75) Inventors: Peter Kufer, Munich (DE); Tobias Raum, Munich (DE); Roman Kischel, Munich (DE); Ralf Lütterbuse, Munich (DE); Patrick Hoffmann, Munich (DE); Doris Rau, Munich (DE); Susanne Mangold, Munich (DE); Matthias Klinger, Munich (DE); Evelyne aschaller, Munich (DE); Susanne Hausmann, Munich (DE); Petra Fluhr, Munich (DE); Carola Steiger, Munich (DE)

(73) Assignee: Micromet AG

(21) Appl. No.: 13/122,245

(22) PCT Filed: Oct. 1, 2009
(86) PCT No.: PCT/EP2009/062793

§ 371 Date: Jul. 15, 2011

Related U.S. Application Data
(60) Provisional application No. 61/101,857, filed on Oct. 1, 2008.

(51) Int. Cl. A61K 39/395; C12N 5/10; C12N 1/00; A61P 35/00; C12N 15/63; C07K 16/18; C07H 21/04; C12P 21/00; C12N 1/21

(52) U.S. Cl. 424/139.1; 435/69.6; 435/328; 435/243; 435/252.33; 435/320.1; 530/387.9; 536/23.53

(57) ABSTRACT

The present invention relates to a bispecific single chain antibody molecule comprising a first binding domain capable of binding to an epitope of human and non-chimpanzee primate CD3 epsilon chain, wherein the epitope is part of an amino acid sequence comprised in the group consisting of SEQ ID NOs. 2, 4, 6, and 8, and a second binding domain capable of binding to prostate-specific membrane antigen (PSMA). The invention also provides nucleic acids encoding said bispecific single chain antibody molecule as well as vectors and host cells and a process for its production. The invention further relates to pharmaceutical compositions comprising said bispecific single chain antibody molecule and medical uses of said bispecific single chain anti-body molecule.

[0001] The present invention relates to a bispecific single chain antibody molecule comprising a first binding domain capable of binding to an epitope of human and non-chimpanzee primate CD3 epsilon chain, wherein the epitope is part of an amino acid sequence comprised in the group consisting of SEQ ID NOs. 2, 4, 6, and 8, and a second binding domain capable of binding to prostate-specific membrane antigen (PSMA). The invention also provides nucleic acids encoding said bispecific single chain antibody molecule as well as vectors and host cells and a process for its production. The invention further relates to pharmaceutical compositions comprising said bispecific single chain antibody molecule and medical uses of said bispecific single chain antibody molecule.

[0002] T cell recognition is mediated by clonotypically distributed alpha beta and gamma delta T cell receptors (TcR) that interact with the peptide-loaded molecules of the peptide MHC (pMHC) (Davis & Bjorkman, Nature 334 (1988), 395-402). The antigen-specific chains of the TcR do not possess signalling domains but instead are coupled to the conserved multisubunit signaling apparatus CD3 (Call, Cell 111 (2002), 967-979, Alarcon, Immunol. Rev. 191 (2003), 38-46, Malissen Immunol. Rev. 191 (2003), 7-27). The mechanism by which TcR ligation is directly communicated to the signalling apparatus remains a fundamental question in T cell biology (Alarcon, loc. cit.; Davis, Cell 110 (2002), 285-287). It seems clear that sustained T cell responses involve coreceptor engagement, TcR oligomerization, and a higher order arrangement of TcR-pMHC complexes in the immunological synapse (Davis & van der Merwe, Curr. Biol. 11 (2001), R289-R291, Davis, Nat. Immunol. 4 (2003), 217-224). However very early TcR signalling occurs in the absence of these events and may involve a ligand-induced conformational change in CD3 epsilon (Alarcon, loc. cit., Davis (2002), loc. cit., Gil, J. Biol. Chem. 276 (2001), 11174-11179, Gil, Cell 109 (2002), 901-912). The epsilon, gamma, delta and zeta subunits of the signaling complex associate with each other to form a CD3 epsilon-gamma heterodimer, a CD3 epsilon-delta heterodimer, and a CD3 zeta-zeta homodimer (Call, loc. cit.).

[0003] Various studies have revealed that the CD3 molecules are important for the proper cell surface expression of the alpha beta TcR and normal T cell development (Berkhout, J. Biol. Chem. 263 (1988), 8528-8536, Wang, J. Exp. Med. 188 (1998), 1375-1380, Kappes, Curr. Opin. Immunol. 7 (1995), 441-447). The solution structure of the ectodomain fragments of the mouse CD3 epsilon gamma heterodimer showed that the epsilon gamma subunits are both C2-set Ig domains that interact with each other to form an unusual side-to-side dimer configuration (Sun, Cell 105 (2001), 913-923). Although the cysteine-rich stalk appears to play an important role in driving CD3 dimerization (Su, loc. cit., Borroto, J. Biol. Chem. 273 (1998), 12807-12816), interaction by means of the extracellular domains of CD3 epsilon and CD3 gamma is sufficient for assembly of these proteins with TcR beta (Manolios, Eur. J. Immunol. 24 (1994), 84-92, Manolios & Li, Immunol. Cell Biol. 73 (1995), 532-536). Although still controversial, the dominant stoichiometry of the TcR most likely comprises one alpha beta TcR, one CD3 epsilon gamma heterodimer, one CD3 epsilon delta heterodimer and one CD3 zeta zeta homodimer (Call, loc. cit.). Given the central role of the human CD3 epsilon gamma heterodimer in the immune response, the crystal structure of this complex bound to the therapeutic antibody OKT3 has recently been elucidated (Kjer-Nielsen, PNAS 101, (2004), 7675-7680).

[0004] A number of therapeutic strategies modulate T cell immunity by targeting TcR signaling, particularly the anti-human CD3 monoclonal antibodies (mAbs) that are widely used clinically in immunosuppressive regimes. The CD3-specific mouse mAb OKT3 was the first mAb licensed for use in humans (Sgro, Toxicology 105 (1995), 23-29) and is widely used clinically as an immunosuppressive agent in transplantation (Chatenoud, Clin. Transplant 7 (1993), 422-430, Chatenoud, Nat. Rev. Immunol. 3 (2003), 123-132, Kumar, Transplant. Proc. 30 (1998), 1351-1352), type 1 diabetes (Chatenoud (2003), loc. cit.), and psoriasis (Utset, J. Rheumatol. 29 (2002), 1907-1913). Moreover, anti-CD3 mAbs can induce partial T cell signalling and clonal anergy (Smith, J. Exp. Med. 185 (1997), 1413-1422). OKT3 has been described in the literature as a potent T cell mitogen (Van Wauve, J. Immunol. 124 (1980), 2708-18) as well as a potent T cell killer (Wong, Transplantation 50 (1990), 683-9). OKT3 exhibits both of these activities in a time-dependent fashion; following early activation of T cells leading to cytokine release, upon further administration OKT3 later blocks all known T cell functions. It is due to this later blocking of T cell function that OKT3 has found such wide application as an immunosuppressant in therapy regimens for reduction or even abolition of allograft tissue rejection.

[0005] OKT3 reverses allograft tissue rejection most probably by blocking the function of all T cells, which play a major role in acute rejection. OKT3 reacts with and blocks the function of the CD3 complex in the membrane of human T cells, which is associated with the antigen recognition structure of T cells (TCR) and is essential for signal transduction. Which subunit of the TCR/CD3 is bound by OKT3 has been the subject of multiple studies. Though some evidence has pointed to a specificity of OKT3 for the epsilon-subunit of the TCR/CD3 complex (Tunnacliffe, Int. Immunol. 1 (1989), 546-50; Kjer-Nielsen, PNAS 101, (2004), 7675-7680). Further evidence has shown that OKT3 binding of the TCR/CD3 complex requires other subunits of this complex to be present (Salmeron, J. Immunol. 147 (1991), 3047-52).

[0006] Other well known antibodies specific for the CD3 molecule are listed in Tunnacliffe, Int. Immunol. 1 (1989), 546-50. As indicated above, such CD3 specific antibodies are able to induce various T cell responses such as lymphokine production (Von Wussow, J. Immunol. 127 (1981), 1197; Palacious, J. Immunol. 128 (1982), 337), proliferation (Van Wauve, J. Immunol. 124 (1980), 2708-18) and suppressor-T cell induction (Kunicka, in “Lymphocyte Typing II” 1 (1986), 223). That is, depending on the experimental conditions, CD3 specific monoclonal antibody can either inhibit or induce cytotoxicity (Leewenberg, J. Immunol. 134 (1985), 3770; Phillips, J. Immunol. 136 (1986) 1579; Platsoucas, Proc. Natl. Acad. Sci. USA 78 (1981), 4500; Itoh, Cell. Immunol. 108 (1987), 283-96; Mentzer, J. Immunol. 135 (1985), 34; Landegren, J. Exp. Med. 155 (1982), 1579; Choi (2001), Eur. J. Immunol. 31, 94-106; Xu (2000), Cell Immunol. 200, 16-26; Kimball (1995), Transpl. Immunol. 3, 212-221).

[0007] Although many of the CD3 antibodies described in the art have been reported to recognize the CD3 epsilon subunit of the CD3 complex, most of them bind in fact to conformational epitopes and, thus, only recognize CD3 epsilon in the native context of the TCR. Conformational epitopes are characterized by the presence of two or more discrete amino acid residues which are separated in the primary sequence, but come together on the surface of the molecule when the polypeptide folds into the native protein/antigen (Sela, (1969) Science 166, 1365 and Layer, (1990) Cell 61, 553-6). The conformational epitopes bound by CD3 epsilon antibodies described in the art may be separated in two groups. In the major group, said epitopes are being formed by two CD3 subunits, e.g. of the CD3 epsilon chain and the CD3 gamma or CD3 delta chain. For example, it has been found in several studies that the most widely used CD3 epsilon monoclonal antibodies OKT3, WT31, UCHT1, 7D6 and Leu-4 did not bind to cells singly transfected with the CD3-epsilon chain. However, these antibodies stained cells doubly transfected with a combination of CD3 epsilon plus either CD3 gamma or CD3 delta (Tunnacliffe, loc. cit.; Law, Int. Immunol. 14 (2002), 389-400; Salmeron, J. Immunol. 147 (1991), 3047-52; Coulie, Eur. J. Immunol. 21 (1991), 1703-9). In a second smaller group, the conformational epitope is being formed within the CD3 epsilon subunit itself. A member of this group is for instance mAb APA 1/1 which has been raised against denatured CD3 epsilon (Risueno, Blood 106 (2005), 601-8). Taken together, most of the CD3 epsilon antibodies described in the art recognize conformational epitopes located on two or more subunits of CD3. The discrete amino acid residues forming the three-dimensional structure of these epitopes may hereby be located either on the CD3 epsilon subunit itself or on the CD3 epsilon subunit and other CD3 subunits such as CD3 gamma or CD3 delta.

[0008] Another problem with respect to CD3 antibodies is that many CD3 antibodies have been found to be species-specific. Anti-CD3 monoclonal antibodies—as holds true generally for any other monoclonal antibodies—function by way of highly specific recognition of their target molecules. They recognize only a single site, or epitope, on their target CD3 molecule. For example, one of the most widely used and best characterized monoclonal antibodies specific for the CD3 complex is OKT-3. This antibody reacts with chimpanzee CD3 but not with the CD3 homolog of other primates, such as macaques, or with dog CD3 (Sandusky et al., J. Med. Primatol. 15 (1986), 441-451). Similarly, WO2005/118635 or WO2007/033230 describe human monoclonal CD3 epsilon antibodies which react with human CD3 epsilon but not with CD3 epsilon of mouse, rat, rabbit or non-chimpanzee primates such as rhesus monkey, cynomolgus monkey or baboon monkey. The anti-CD3 monoclonal antibody UCHT-1 is also reactive with CD3 from chimpanzee but not with CD3 from macaques (own data). On the other hand, there are also examples of monoclonal antibodies, which recognize macaque antigens, but not their human counterparts. One example of this group is monoclonal antibody FN-18 directed to CD3 from macaques (Uda et al., J. Med. Primatol. 30 (2001), 141-147). Interestingly, it has been found that peripheral lymphocytes from about 12% of cynomolgus monkeys lacked reactivity with anti-rhesus monkey CD3 monoclonal antibody (FN-18) due to a polymorphism of the CD3 antigen in macaques. Uda et al. described a substitution of two amino acids in the CD3 sequence of cynomolgus monkeys, which are not reactive with FN-18 antibodies, as compared to CD3 derived from animals, which are reactive with FN-18 antibodies (Uda et al., J Med. Primatol. 32 (2003), 105-10; Uda et al., J Med. Primatol. 33 (2004), 34-7).

[0009] The discriminatory ability, i.e. the species specificity, inherent not only to CD3 monoclonal antibodies (and fragments thereof), but to monoclonal antibodies in general, is a significant impediment to their development as therapeutic agents for the treatment of human diseases. In order to obtain market approval any new candidate medication must pass through rigorous testing. This testing can be subdivided into preclinical and clinical phases: Whereas the latter—further subdivided into the generally known clinical phases I, II and III—is performed in human patients, the former is performed in animals. The aim of pre-clinical testing is to prove that the drug candidate has the desired activity and most importantly is safe. Only when the safety in animals and possible effectiveness of the drug candidate has been established in preclinical testing this drug candidate will be approved for clinical testing in humans by the respective regulatory authority. Drug candidates can be tested for safety in animals in the following three ways, (i) in a relevant species, i.e. a species where the drug candidates can recognize the ortholog antigens, (ii) in a transgenic animal containing the human antigens and (iii) by use of a surrogate for the drug candidate that can bind the ortholog antigens present in the animal. Limitations of transgenic animals are that this technology is typically limited to rodents. Between rodents and man there are significant differences in the physiology and the safety results cannot be easily extrapolated to humans. The limitations of a surrogate for the drug candidate are the different composition of matter compared to the actual drug candidate and often the animals used are rodents with the limitation as discussed above. Therefore, preclinical data generated in rodents are of limited predictive power with respect to the drug candidate. The approach of choice for safety testing is the use of a relevant species, preferably a lower primate. The limitation now of monoclonal antibodies suitable for therapeutic intervention in man described in the art is that the relevant species are higher primates, in particular chimpanzees. Chimpanzees are considered as endangered species and due to their human-like nature, the use of such animals for drug safety testing has been banned in Europe and is highly restricted elsewhere. CD3 has also been successfully used as a target for bispecific single chain antibodies in order to redirect cytotoxic T cells to pathological cells, resulting in the depletion of the diseased cells from the respective organism (WO 99/54440; WO 04/106380). For example, Bargou et al. (Science 321 (2008):974-7) have recently reported on the clinical activity of a CD19×CD3 bispecific antibody construct called blinatumomab, which has the potential to engage all cytotoxic T cells in human patients for lysis of cancer cells. Doses as low as 0.005 milligrams per square meter per day in non-Hodgkin's lymphoma patients led to an elimination of target cells in blood. Partial and complete tumor regressions were first observed at a dose level of 0.015 milligrams, and all seven patients treated at a dose level of 0.06 milligrams experienced a tumor regression. Blinatumomab also led to clearance of tumor cells from bone marrow and liver. Though this study established clinical proof of concept for the therapeutic potency of the bispecific single chain antibody format in treating blood-cell derived cancer, there is still need for successful concepts for therapies of other cancer types.

[0010] In 2008, an estimated 186,320 men will be newly diagnosed with prostate cancer in the United States and about 28,660 men will die from the disease. The most recent report available on cancer mortality shows that, in 2004, the overall death rate from prostate cancer among American men was 25 per 100,000. In the late 1980s, the widespread adoption of the prostate-specific antigen (PSA) test represented a major improvement in the management of prostate cancer. This test measures the amount of PSA protein in the blood, which is often elevated in patients with prostate cancer. In 1986, the U.S. Food and Drug Administration approved the use of the PSA test to monitor patients with prostate cancer and, in 1994, additionally approved its use as a screening test for this disease. Due to the widespread implementation of PSA testing in the United States, approximately 90 percent of all prostate cancers are currently diagnosed at an early stage, and, consequently, men are surviving longer after diagnosis. However, the results of two ongoing clinical trials, the NCl-sponsored Prostate, Lung, Colorectal, and Ovarian (PLCO) screening trial and the European Study of Screening for Prostate Cancer (ERSPC) will be needed to determine whether PSA screening actually saves lives. Ongoing clinical trials over the past 25 years have investigated the effectiveness of natural and synthetic compounds in the prevention of prostate cancer. For example, the Prostate Cancer Prevention Trial (PCPT), which enrolled nearly 19,000 healthy men, found that finasteride, a drug approved for the treatment of benign prostatic hyperplasia (BPH), which is a noncancerous enlargement of the prostate, reduced the risk of developing prostate cancer by 25 percent. Another trial, the Selenium and Vitamin E Cancer Prevention Trial (SELECT), is studying more than 35,000 men to determine whether daily supplements of selenium and vitamin E can reduce the incidence of prostate cancer in healthy men. Other prostate cancer prevention trials are currently evaluating the protective potential of multivitamins, vitamins C and D, soy, green tea, and lycopene, which is a natural compound found in tomatoes. One study, reported in 2005, showed that specific genes were fused in 60 to 80 percent of the prostate tumors analyzed. This study represents the first observation of non-random gene rearrangements in prostate cancer. This genetic alteration may eventually be used as a biomarker to aid in the diagnosis and, possibly, treatment of this disease. Other studies have shown that genetic variations in a specific region of chromosome 8 can increase a man's risk of developing prostate cancer. These genetic variations account for approximately 25 percent of the prostate cancers that occur in white men. They are the first validated genetic variants that increase the risk of developing prostate cancer and may help scientists better understand the genetic causes of this disease. There is also ongoing research that examines how proteins circulating in a patient's blood can be used to improve the diagnosis of prostate and other cancers. In 2005, scientists identified a group of specific proteins that are produced by a patient's immune system in response to prostate tumors. These proteins, a type of autoantibody, were able to detect the presence of prostate cancer cells in blood specimens with greater than 90 percent accuracy. When used in combination with PSA, these and other blood proteins may eventually be used to reduce the number of false-positive results obtained with PSA testing alone and, therefore, reduce the large number of unnecessary prostate biopsies that are performed each year due to false-positive PSA test results.

[0011] Apart from PSA, several other markers for prostate cancer have been identified, including e.g. the six-transmembrane epithelial antigen of the prostate (STEAP) (Hubert et al., PNAS 96 (1999), 14523-14528), the prostate stem cell antigen (PSCA) (Reiter et al., Proc. Nat. Acad. Sci. 95: 1735-1740, 1998) and the prostate-specific membrane antigen (PSMA; PSM) (Israeli et al., Cancer Res. 53 (1993). PSMA was originally defined by the monoclonal antibody (MAb) 7E11 derived from immunization with a partially purified membrane preparation from the lymph node prostatic adenocarcinoma (LNCaP) cell line (Horoszewicz et al., Anticancer Res. 7 (1987), 927-35). A 2.65-kb cDNA fragment encoding the PSMA protein was cloned and subsequently mapped to chromosome 11p11.2 (Israeli et al., loc. cit.; O'Keefe et al., Biochem. Biophys. Acta 1443 (1998), 113-127). Initial analysis of PSMA demonstrated widespread expression within the cells of the prostatic secretory epithelium. Immunohistochemical staining demonstrated that PSMA was absent to moderately expressed in hyperplastic and benign tissues, while malignant tissues stained with the greatest intensity (Horoszewicz et al., loc. cit.). Subsequent investigations have recapitulated these results and evinced PSMA expression as a universal feature in practically every prostatic tissue examined to date. These reports further demonstrate that expression of PSMA increases precipitously proportional to tumor aggressiveness (Burger et al., Int. J. Cancer 100 (2002), 228-237; Chang et al., Cancer Res. 59 (1999), 3192-98; Chang et al., Urology 57 (2001), 1179-83), Kawakami and Nakayama, Cancer Res. 57 (1997), 2321-24; Liu et al., Cancer Res. 57 (1997), 3629-34; Lopes et al., Cancer Res. 50 (1990), 6423-29; Silver et al., Clin. Cancer Res. 9 (2003), 6357-62; Sweat et al., Urology 52 (1998), 637-40; Troyer et al., Int. J. Cancer 62 (1995), 552-558; Wright et al., Urology 48 (1996), 326-334). Consistent with the correlation between PSMA expression and tumor stage, increased levels of PSMA are associated with androgen-independent prostate cancer (PCa). Analysis of tissue samples from patients with prostate cancer has demonstrated elevated PSMA levels after physical castration or androgen-deprivation therapy. Unlike expression of prostate specific antigen, which is downregulated after androgen ablation, PSMA expression is significantly increased in both primary and metastatic tumor specimens (Kawakami et al., Wright et al., loc. cit.). Consistent with the elevated expression in androgen-independent tumors, PSMA transcription is also known to be downregulated by steroids, and administration of testosterone mediates a dramatic reduction in PSMA protein and mRNA levels (Israeli et al., Cancer Res. 54 (1994), 1807-11; Wright et al., loc. cit.). PSMA is also highly expressed in secondary prostatic tumors and occult metastatic disease. Immunohistochemical analysis has revealed relatively intense and homogeneous expression of PSMA within metastatic lesions localized to lymph nodes, bone, soft tissue, and lungs compared with benign prostatic tissues (Chang et al. (2001), loc. cit.; Murphy et al., Cancer 78 (1996), 809-818; Sweat et al., loc. cit.). Some reports have also indicated limited PSMA expression in extraprostatic tissues, including a subset of renal proximal tubules, some cells of the intestinal brush-border membrane, and rare cells in the colonic crypts (Chang et al. (1999), Horoszewicz et al., Israeli et al. (1994), Lopes et al., Troyer et al., loc. cit.). However, the levels of PSMA in these tissues are generally two to three orders of magnitude less than those observed in the prostate (Sokoloff et al., Prostate 43 (2000), 150-157). PSMA is also expressed in the tumor-associated neovasculature of most solid cancers examined yet is absent in the normal vascular endothelium (Chang et al. (1999), Liu et al., Silver et al., loc. cit.). Although the significance of PSMA expression within the vasculature is unknown, the specificity for tumor-associated endothelium makes PSMA a potential target for the treatment of many forms of malignancy.

[0012] Though there has been put much effort in identifying novel targets for therapeutic approaches for cancer, cancer is yet one of the most frequently diagnosed diseases. In light of this, there is still need for effective treatments for cancer.

[0013] The present invention provides for a bispecific single chain antibody molecule comprising a first binding domain capable of binding to an epitope of human and non-chimpanzee primate CD3_{ε} (epsilon) chain, wherein the epitope is part of an amino acid sequence comprised in the group consisting of SEQ ID NOs. 2, 4, 6, and 8; and a second binding domain capable of binding to prostate-specific membrane antigen (PSMA).

[0014] Though T cell-engaging bispecific single chain antibodies described in the art have great therapeutic potential for the treatment of malignant diseases, most of these bispecific molecules are limited in that they are species specific and recognize only human antigen, and—due to genetic similarity—likely the chimpanzee counterpart. The advantage of the present invention is the provision of a bispecific single chain antibody comprising a binding domain exhibiting cross-species specificity to human and non-chimpanzee primate of the CD3 epsilon chain.

[0015] In the present invention, an N-terminal 1-27 amino acid residue polypeptide fragment of the extracellular domain of CD3 epsilon was surprisingly identified which—in contrast to all other known epitopes of CD3 epsilon described in the art—maintains its three-dimensional structural integrity when taken out of its native environment in the CD3 complex (and optionally fused to a heterologous amino acid sequence such as EpCAM or an immunoglobulin Fc part). The present invention, therefore, provides for a bispecific single chain antibody molecule comprising a first binding domain capable of binding to an epitope of an N-terminal 1-27 amino acid residue polypeptide fragment of the extracellular domain of CD3 epsilon (which CD3 epsilon is, for example, taken out of its native environment and/or comprised by (presented on the surface of) a T-cell) of human and at least one non-chimpanzee primate CD3 epsilon chain, wherein the epitope is part of an amino acid sequence comprised in the group consisting of SEQ ID NOs. 2, 4, 6, and 8; and a second binding domain capable of binding to prostate-specific membrane antigen (PSMA). Preferred non-chimpanzee primates are mentioned herein elsewhere. At least one (or a selection thereof or all) primate(s) selected from Callithrix jacchus; Saguinus oedipus, Saimiri sciureus, and Macaca fascicularis (either SEQ ID 1047 or 1048 or both), is (are) particularly preferred. Macaca mulatta, also known as Rhesus Monkey is also envisaged as another preferred primate. It is thus envisaged that antibodies of the invention bind to (are capable of binding to) the context independent epitope of an N-terminal 1-27 amino acid residue polypeptide fragment of the extracellular domain of CD3 epsilon of human and Callithrix jacchus, Saguinus oedipus, Saimiri sciureus, and Macaca fascicularis (either SEQ ID 1047 or 1048 or both), and optionally also to Macaca mulatta. A bispecific single chain antibody molecule comprising a first binding domain as defined herein can be obtained (is obtainable by) or can be manufactured in accordance with the protocol set out in the appended Examples (in particular Example 2). To this end, it is envisaged to (a) immunize mice with an N-terminal 1-27 amino acid residue polypeptide fragment of the extracellular domain of CD3 epsilon of human and/or Saimiri sciureus; (b) generation of an immune murine antibody scFv library; (c) identification of CD3 epsilon specific binders by testing the capability to bind to at least SEQ ID NOs. 2, 4, 6, and 8.

[0016] The context-independence of the CD3 epitope provided in this invention corresponds to the first 27 N-terminal amino acids of CD3 epsilon or functional fragments of this 27 amino acid stretch. The phrase “context-independent,” as used herein in relation to the CD3 epitope means that binding of the herein described inventive binding molecules/antibody molecules does not lead to a change or modification of the conformation, sequence, or structure surrounding the antigenic determinant or epitope. In contrast, the CD3 epitope recognized by a conventional CD3 binding molecule (e.g. as disclosed in WO 99/54440 or WO 04/106380) is localized on the CD3 epsilon chain C-terminally to the N-terminal 1-27 amino acids of the context-independent epitope, where it only takes the correct conformation if it is embedded within the rest of the epsilon chain and held in the right sterical position by heterodimerization of the epsilon chain with either the CD3 gamma or delta chain. Anti-CD3 binding domains as part of a PSMA×CD3 bispecific single chain molecule as provided herein and generated (and directed) against a context-independent CD3 epitope provide for a surprising clinical improvement with regard to T cell redistribution and, thus, a more favourable safety profile. Without being bound by theory, since the CD3 epitope is context-independent, forming an autonomous selfsufficient subdomain without much influence on the rest of the CD3 complex, the CD3 binding domain of the PSMA×CD3 bispecific single chain molecule provided herein induces less allosteric changes in CD3 conformation than the conventional CD3 binding molecules (like molecules provided in WO 99/54440 or WO 04/106380), which recognize context-dependent CD3 epitopes.

[0017] The context-independence of the CD3 epitope which is recognized by the CD3 binding domain of the PSMA×CD3 bispecific single chain antibody of the invention is associated with less or no T cell redistribution (T cell redistribution equates with an initial episode of drop and subsequent recovery of absolute T cell counts) during the starting phase of treatment with said PSMA×CD3 bispecific single chain antibody of the invention. This results in a better safety profile of the PSMA×CD3 bispecific single chain antibody of the invention compared to conventional CD3 binding molecules known in the art, which recognize context-dependent CD3 epitopes. Particularly, because T cell redistribution during the starting phase of treatment with CD3 binding molecules is a major risk factor for adverse events, like CNS adverse events, the PSMA×CD3 bispecific single chain antibody of the invention by recognizing a context-independent rather than a context-dependent CD3 epitope has a substantial safety advantage over the CD3 binding molecules known in the art. Patients with such CNS adverse events related to T cell redistribution during the starting phase of treatment with conventional CD3 binding molecules usually suffer from confusion and disorientation, in some cases also from urinary incontinence. Confusion is a change in mental status in which the patient is not able to think with his or her usual level of clarity. The patient usually has difficulties to concentrate and thinking is not only blurred and unclear but often significantly slowed down. Patients with CNS adverse events related to T cell redistribution during the starting phase of treatment with conventional CD3 binding molecules may also suffer from loss of memory. Frequently, the confusion leads to the loss of ability to recognize people, places, time or the date. Feelings of disorientation are common in confusion, and the decision-making ability is impaired. CNS adverse events related to T cell redistribution during the starting phase of treatment with conventional CD3 binding molecules may further comprise blurred speech and/or word finding difficulties. This disorder may impair both, the expression and understanding of language as well as reading and writing. Besides urinary incontinence, vertigo and dizziness may also accompany CNS adverse events related to T cell redistribution during the starting phase of treatment with conventional CD3 binding molecules in some patients. The maintenance of the three-dimensional structure within the mentioned 27 amino acid N-terminal polypeptide fragment of CD3 epsilon can be used for the generation of, preferably human, binding domains which are capable of binding to the N-terminal CD3 epsilon polypeptide fragment in vitro and to the native (CD3 epsilon subunit of the) CD3 complex on T cells in vivo with the same binding affinity. These data strongly indicate that the N-terminal fragment as described herein forms a tertiary conformation, which is similar to its structure normally existing in vivo. A very sensitive test for the importance of the structural integrity of the amino acids 1-27 of the N-terminal polypeptide fragment of CD3 epsilon was performed. Individual amino acids of amino acids 1-27 of the N-terminal polypeptide fragment of CD3 epsilon were changed to alanine (alanine scanning) to test the sensitivity of the amino acids 1-27 of the N-terminal polypeptide fragment of CD3 epsilon for minor disruptions. The CD3 specific binding domains as part of the PSMA×CD3 bispecific single chain antibody of the invention were used to test for binding to the alanine-mutants of amino acids 1-27 of the N-terminal polypeptide fragment of CD3 epsilon (see appended Example 5). Individual exchanges of the first five amino acid residues at the very N-terminal end of the fragment and two of the amino acids at positions 23 and 25 of the amino acids 1-27 of the N-terminal polypeptide fragment of CD3 epsilon were critical for binding of the antibody molecules. The substitution of amino acid residues in the region of position 1-5 comprising the residues Q (Glutamine at position 1), D (Aspartic acid at position 2), G (Glycine at position 3), N (Asparagine at position 4), and E (Glutamic acid at position 5) to Alanine abolished binding of the, preferably human, PSMA×CD3 bispecific single chain antibody of the invention to said fragment. While, for at least some of the, preferably human, PSMA×CD3 bispecific single chain antibody of the invention, two amino acid residues at the C-terminus of the mentioned fragment T (Threonine at position 23) and I (Isoleucine at position 25) reduced the binding energy to the, preferably human, PSMA×CD3 bispecific single chain antibody of the invention.

[0018] Unexpectedly, it has been found that the thus isolated, preferably human, PSMA×CD3 bispecific single chain antibody of the invention not only recognizes the human N-terminal fragment of CD3 epsilon, but also the corresponding homologous fragments of CD3 epsilon of various primates, including New-World Monkeys (Marmoset, Callithrix jacchus; Saguinus oedipus; Saimiri sciureus) and Old-World Monkeys (Macaca fascicularis, also known as Cynomolgus Monkey; or Macaca mulatta, also known as Rhesus Monkey). Thus, multi-primate specificity of the PSMA×CD3 bispecific single chain antibody of the invention was detected. The following sequence analyses confirmed that human and primates share a highly homologous sequence stretch at the N-terminus of the extracellular domain of CD3 epsilon.

[0019] The amino acid sequence of the aformentioned N-terminal fragments of CD3 epsilon are depicted in SEQ ID No. 2 (human), SEQ ID No. 4 (Callithrix jacchus); SEQ ID No. 6 (Saguinus oedipus); SEQ ID No. 8 (Saimiri sciureus); SEQ ID No. 1047 QDGNEEMGSITQTPYQVSISGTTILTC or SEQ ID No. 1048 QDGNEEMGSITQTPYQVSISGTTVILT (Macaca fascicularis, also known as Cynomolgus Monkey), and SEQ ID No. 1049 QDGNEEMGSITQTPYHVSISGTTVILT (Macaca mulatta, also known as Rhesus Monkey).

[0020] The second binding domain of the PSMA×CD3 bispecific single chain antibody of the invention binds to the prostate-specific membrane antigen (PSMA). Preferably, the second binding domain of the PSMA×CD3 bispecific single chain antibody binds to the human PSMA or a non-chimpanzee primate PSMA; more preferred it binds to the human PSMA and a non-chimpanzee primate PSMA and therefore is cross-species specific; even more preferred to the human PSMA and the macaque PSMA (and therefore is cross-species specific as well). Particularly preferred, the macaque PSMA is the Cynomolgus monkey PSMA and/or the Rhesus monkey PSMA. However, it is not excluded from the scope of the present invention, that the second binding domain may also bind to PSMA homologs of other species, such as to the PSMA homolog in rodents.

[0021] Prostate cancer is the second most cancer in men. For 2008, it is estimated that 186,320 men will be newly diagnosed with prostate cancer in the United States and about 28,660 men will die from the disease. Prostate cancer risk is strongly related to age: very few cases are registered in men under 50 and three-quarters of cases occur in men over 65 years. The largest number of cases is diagnosed in those aged 70-74. Currently, the growth rate of the older population is significantly higher than that of the total population. By 2025-2030, projections indicate that the population over 60 will be growing 3.5 times as rapidly as the total population. The proportion of older persons is projected to more than double worldwide over the next half century, which means that a further increase in incidence of diagnosed prostate cancer has to be expected for the future. The highly restricted expression of PSMA and its upregulation in advanced stages and metastatic disease of prostate cancer as well as its role as neoantigen on tumor vasculature of many different types of other solid tumors qualifies PSMA as attractive target antigen for antibody-based cancer therapy. As shown in the following examples, the PSMA×CD3 bispecific single chain antibody of the invention provides an advantageous tool in order to kill PSMA-expressing human cancer cells, as exemplified by the human prostate cancer cell line LNCaP. In addition, the cytotoxic activity of the PSMA×CD3 bispecific single chain antibody of the invention is higher than the cytotoxic activity of antibodies described in the art. Since preferably both the CD3 and the PSMA binding domain of the PSMA×CD3 bispecific single chain antibody of the invention are cross-species specific, i.e. reactive with the human and non-chimpanzee primates antigens, it can be used for preclinical evaluation of safety, activity and/or pharmacokinetic profile of these binding domains in primates and—in the identical form—as drug in humans.

[0022] Advantageously, the present invention provides also PSMA×CD3 bispecific single chain antibodies comprising a second binding domain which binds both to the human PSMA and to the macaque PSMA homolog, i.e. the homolog of a non-chimpanzee primate. In a preferred embodiment, the bispecific single chain antibody thus comprises a second binding domain exhibiting cross-species specificity to the human and a non-chimpanzee primate PSMA. In this case, the identical bispecific single chain antibody molecule can be used both for preclinical evaluation of safety, activity and/or pharmacokinetic profile of these binding domains in primates and as drug in humans. Put in other words, the same molecule can be used in preclinical animal studies as well as in clinical studies in humans. This leads to highly comparable results and a much-increased predictive power of the animal studies compared to species-specific surrogate molecules. Since both the CD3 and the PSMA binding domain of the PSMA×CD3 bispecific single chain antibody of the invention are cross-species specific, i.e. reactive with the human and non-chimpanzee primates' antigens, it can be used both for preclinical evaluation of safety, activity and/or pharmacokinetic profile of these binding domains in primates and—in the identical form—as drug in humans. It will be understood that in a preferred embodiment, the cross-species specificity of the first and second binding domain of the antibodies of the invention is identical.

[0023] It has been found in the present invention that it is possible to generate a, preferably human, PSMA×CD3 bispecific single chain antibody wherein the identical molecule can be used in preclinical animal testing, as well as clinical studies and even in therapy in human. This is due to the unexpected identification of the, preferably human, PSMA×CD3 bispecific single chain antibody, which, in addition to binding to human CD3 epsilon and PSMA, respectively, (and due to genetic similarity likely to the chimpanzee counterpart), also binds to the homologs of said antigens of non-chimpanzee primates, including New-World Monkeys and Old-World Monkeys. As shown in the following Examples, said preferably human, PSMA×CD3 bispecific single chain antibody of the invention can be used as therapeutic agent against various diseases, including, but not limited, to cancer. The PSMA×CD3 bispecific single chain antibody is particularly advantageous for the therapy of cancer, preferably solid tumors, more preferably carcinomas and prostate cancer. In view of the above, the need to construct a surrogate PSMA×CD3 bispecific single chain antibody for testing in a phylogenetic distant (from humans) species disappears. As a result, the identical molecule can be used in animal preclinical testing as is intended to be administered to humans in clinical testing as well as following market approval and therapeutic drug administration. The ability to use the same molecule for preclinical animal testing as in later administration to humans virtually eliminates, or at least greatly reduces, the danger that the data obtained in preclinical animal testing have limited applicability to the human case. In short, obtaining preclinical safety data in animals using the same molecule as will actually be administered to humans does much to ensure the applicability of the data to a human-relevant scenario. In contrast, in conventional approaches using surrogate molecules, said surrogate molecules have to be molecularly adapted to the animal test system used for preclinical safety assessment. Thus, the molecule to be used in human therapy in fact differs in sequence and also likely in structure from the surrogate molecule used in preclinical testing in pharmacokinetic parameters and/or biological activity, with the consequence that data obtained in preclinical animal testing have limited applicability/transferability to the human case. The use of surrogate molecules requires the construction, production, purification and characterization of a completely new construct. This leads to additional development costs and time necessary to obtain that molecule. In sum, surrogates have to be developed separately in addition to the actual drug to be used in human therapy, so that two lines of development for two molecules have to be carried out. Therefore, a major advantage of the, preferably human, PSMA×CD3 bispecific single chain antibody of the invention exhibiting cross-species specificity described herein is that the identical molecule can be used for therapeutic agents in humans and in preclinical animal testing.

[0024] It is preferred that at least one of said first or second binding domains of the bispecific single chain antibody of the invention is CDR-grafted, humanized or human, as set forth in more detail below. Preferably, both the first and second binding domains of the bispecific single chain antibody of the invention are CDR-grafted, humanized or human. For the preferably human, PSMA×CD3 bispecific single chain antibody of the invention, the generation of an immune reaction against said binding molecule is excluded to the maximum possible extent upon administration of the molecule to human patients.

[0025] Another major advantage of the, preferably human, PSMA×CD3 bispecific single chain antibody of the invention is its applicability for preclinical testing in various primates. The behavior of a drug candidate in animals should ideally be indicative of the expected behavior of this drug candidate upon administration to humans. As a result, the data obtained from such preclinical testing should therefore generally have a highly predictive power for the human case. However, as learned from the tragic outcome of the recent Phase I clinical trial on TGN1412 (a CD28 monoclonal antibody), a drug candidate may act differently in a primate species than in humans: Whereas in preclinical testing of said antibody no or only limited adverse effects have been observed in animal studies performed with cynomolgus monkeys, six human patients developed multiple organ failure upon administration of said antibody (Lancet 368 (2006), 2206-7). The results of these dramatic, non-desired negative events suggest that it may not be sufficient to limit preclinical testing to only one (non-chimpanzee primate) species. The fact that the PSMA×CD3 bispecific single chain antibody of the invention binds to a series of New-World and Old-World Monkeys may help to overcome the problems faced in the case mentioned above. Accordingly, the present invention provides means and methods for minimizing species differences in effects when drugs for human therapy are being developed and tested.

[0026] With the, preferably human, cross-species specific PSMA×CD3 bispecific single chain antibody of the invention it is also no longer necessary to adapt the test animal to the drug candidate intended for administration to humans, such as e.g. the creation of transgenic animals. The, preferably human, PSMA×CD3 bispecific single chain antibody of the invention exhibiting cross-species specificity according to the uses and the methods of invention can be directly used for preclinical testing in non-chimpanzee primates, without any genetic manipulation of the animals. As well known to those skilled in the art, approaches in which the test animal is adapted to the drug candidate always bear the risk that the results obtained in the preclinical safety testing are less representative and predictive for humans due to the modification of the animal. For example, in transgenic animals, the proteins encoded by the transgenes are often highly over-expressed. Thus, data obtained for the biological activity of an antibody against this protein antigen may be limited in their predictive value for humans in which the protein is expressed at much lower, more physiological levels.

[0027] A further advantage of the uses of the preferably human PSMA×CD3 bispecific single chain antibody of the invention exhibiting cross-species specificity is the fact that chimpanzees as an endangered species are avoided for animal testing. Chimpanzees are the closest relatives to humans and were recently grouped into the family of hominids based on the genome sequencing data (Wildman et al., PNAS 100 (2003), 7181). Therefore, data obtained with chimpanzee is generally considered to be highly predictive for humans. However, due to their status as endangered species, the number of chimpanzees, which can be used for medical experiments, is highly restricted. As stated above, maintenance of chimpanzees for animal testing is therefore both costly and ethically problematic. The uses of the, preferably human, PSMA×CD3 bispecific single chain antibody of the invention avoid both ethical objections and financial burden during preclinical testing without prejudicing the quality, i.e. applicability, of the animal testing data obtained. In light of this, the uses of the, preferably human, PSMA×CD3 bispecific single chain antibody of the invention provide for a reasonable alternative for studies in chimpanzees.

[0028] A still further advantage of the, preferably human, PSMA×CD3 bispecific single chain antibody of the invention is the ability of extracting multiple blood samples when using it as part of animal preclinical testing, for example in the course of pharmacokinetic animal studies. Multiple blood extractions can be much more readily obtained with a non-chimpanzee primate than with lower animals, e.g. a mouse. The extraction of multiple blood samples allows continuous testing of blood parameters for the determination of the biological effects induced by the, preferably human, PSMA×CD3 bispecific single chain antibody of the invention. Furthermore, the extraction of multiple blood samples enables the researcher to evaluate the pharmacokinetic profile of the, preferably human, PSMA×CD3 bispecific single chain antibody of the invention as defined herein. In addition, potential side effects, which may be induced by said, preferably human, PSMA×CD3 bispecific single chain antibody of the invention reflected in blood parameters can be measured in different blood samples extracted during the course of the administration of said antibody.

[0029] This allows the determination of the potential toxicity profile of the, preferably human, PSMA×CD3 bispecific single chain antibody of the invention as defined herein.

[0030] The advantages of the, preferably human, PSMA×CD3 bispecific single chain antibody of the invention as defined herein exhibiting cross-species specificity may be briefly summarized as follows:

[0031] First, the, preferably human, PSMA×CD3 bispecific single chain antibody of the invention as defined herein used in preclinical testing is the same as the one used in human therapy. Thus, it is no longer necessary to develop two independent molecules, which may differ in their pharmacokinetic properties and biological activity. This is highly advantageous in that e.g. the pharmacokinetic results are more directly transferable and applicable to the human setting than e.g. in conventional surrogate approaches.

[0032] Second, the uses of the, preferably human, PSMA×CD3 bispecific single chain antibody of the invention as defined herein for the preparation of therapeutics in human is less cost- and labor-intensive than surrogate approaches.

[0033] Third, the, preferably human, PSMA×CD3 bispecific single chain antibody of the invention as defined herein can be used for preclinical testing not only in one primate species, but in a series of different primate species, thereby limiting the risk of potential species differences between primates and human.

[0034] Fourth, chimpanzee as an endangered species for animal testing can be avoided if desired.

[0035] Fifth, multiple blood samples can be extracted for extensive pharmacokinetic studies.

[0036] Sixth, due to the human origin of the, preferably human, binding molecules according to a preferred embodiment of the invention, the generation of an immune reaction against said binding molecules is minimalized when administered to human patients. Induction of an immune response with antibodies specific for a drug candidate derived from a non-human species as e.g. a mouse leading to the development of human-anti-mouse antibodies (HAMAs) against therapeutic molecules of murine origin is excluded.

[0037] Last but not least, the therapeutic use of the PSMA×CD3 bispecific single chain antibody of the invention provides a novel and inventive therapeutic approach for cancer, preferably solid tumors, more preferably carcinomas and prostate cancer. As shown in the following examples, the PSMA×CD3 bispecific single chain antibody of the invention provides an advantageous tool in order to kill PSMA-expressing human prostate cancer cells. Moreover, the cytotoxic activity of the PSMA×CD3 bispecific single chain antibody of the invention is higher than the activity of antibodies described in the art.

[0038] As noted herein above, the present invention provides polypeptides, i.e. bispecific single chain antibodies, comprising a first binding domain capable of binding to an epitope of human and non-chimpanzee primate CD3_{ε} chain and a second binding domain capable of binding to PSMA. The second binding domain preferably binds to human PSMA and a non-chimpanzee primate PSMA. The advantage of bispecific single chain antibody molecules as drug candidates fulfilling the requirements of the preferred bispecific single chain antibody of the invention is the use of such molecules in preclinical animal testing as well as in clinical studies and even for therapy in human. In a preferred embodiment of the cross-species specific bispecific single chain antibodies of the invention the second binding domain binding to PSMA is human. In a cross-species specific bispecific molecule according to the invention the binding domain binding to an epitope of human and non-chimpanzee primate CD3 epsilon chain is located in the order VH-VL or VL-VH at the N-terminus or the C-terminus of the bispecific molecule. Examples for cross-species specific bispecific molecules according to the invention in different arrangements of the VH- and the VL-chain in the first and the second binding domain are described in the appended examples.

[0039] As used herein, a “bispecific single chain antibody” denotes a single polypeptide chain comprising two binding domains. Each binding domain comprises one variable region from an antibody heavy chain (“VH region”), wherein the VH region of the first binding domain specifically binds to the CD3_{ε} molecule, and the VH region of the second binding domain specifically binds to PSMA. The two binding domains are optionally linked to one another by a short polypeptide spacer. A non-limiting example for a polypeptide spacer is Gly-Gly-Gly-Gly-Ser (G-G-G-G-S) and repeats thereof. Each binding domain may additionally comprise one variable region from an antibody light chain (“VL region”), the VH region and VL region within each of the first and second binding domains being linked to one another via a polypeptide linker, for example of the type disclosed and claimed in EP 623679 B1, but in any case long enough to allow the VH region and VL region of the first binding domain and the VH region and VL region of the second binding domain to pair with one another such that, together, they are able to specifically bind to the respective first and second binding domains.

[0040] The term “protein” is well known in the art and describes biological compounds. Proteins comprise one or more amino acid chains (polypeptides), whereby the amino acids are bound among one another via a peptide bond. The term “polypeptide” as used herein describes a group of molecules, which consists of more than 30 amino acids. In accordance with the invention, the group of polypeptides comprises “proteins” as long as the proteins consist of a single polypeptide chain. Also in line with the definition the term “polypeptide” describes fragments of proteins as long as these fragments consist of more than 30 amino acids. Polypeptides may further form multimers such as dimers, trimers and higher oligomers, i.e. consisting of more than one polypeptide molecule. Polypeptide molecules forming such dimers, trimers etc. may be identical or non-identical. The corresponding higher order structures of such multimers are, consequently, termed homo- or heterodimers, homo- or heterotrimers etc. An example for a hereteromultimer is an antibody molecule, which, in its naturally occurring form, consists of two identical light polypeptide chains and two identical heavy polypeptide chains. The terms “polypeptide” and “protein” also refer to naturally modified polypeptides/proteins wherein the modification is effected e.g. by post-translational modifications like glycosylation, acetylation, phosphorylation and the like. Such modifications are well known in the art.

[0041] The term “binding domain” characterizes in connection with the present invention a domain of a polypeptide which specifically binds to/interacts with a given target structure/antigen/epitope. Thus, the binding domain is an “antigen-interaction-site”. The term “antigen-interaction-site” defines, in accordance with the present invention, a motif of a polypeptide, which is able to specifically interact with a specific antigen or a specific group of antigens, e.g. the identical antigen in different species. Said binding/interaction is also understood to define a “specific recognition”. The term “specifically recognizing” means in accordance with this invention that the antibody molecule is capable of specifically interacting with and/or binding to at least two, preferably at least three, more preferably at least four amino acids of an antigen, e.g. the human CD3 antigen as defined herein. Such binding may be exemplified by the specificity of a “lock-and-key-principle”. Thus, specific motifs in the amino acid sequence of the binding domain and the antigen bind to each other as a result of their primary, secondary or tertiary structure as well as the result of secondary modifications of said structure. The specific interaction of the antigen-interaction-site with its specific antigen may result as well in a simple binding of said site to the antigen. Moreover, the specific interaction of the binding domain/antigen-interaction-site with its specific antigen may alternatively result in the initiation of a signal, e.g. due to the induction of a change of the conformation of the antigen, an oligomerization of the antigen, etc. A preferred example of a binding domain in line with the present invention is an antibody. The binding domain may be a monoclonal or polyclonal antibody or derived from a monoclonal or polyclonal antibody.

[0042] The term “antibody” comprises derivatives or functional fragments thereof which still retain the binding specificity. Techniques for the production of antibodies are well known in the art and described, e.g. in Harlow and Lane “Antibodies, A Laboratory Manual”, Cold Spring Harbor Laboratory Press, 1988 and Harlow and Lane “Using Antibodies: A Laboratory Manual” Cold Spring Harbor Laboratory Press, 1999. The term “antibody” also comprises immunoglobulins (Ig's) of different classes (i.e. IgA, IgG, IgM, IgD and IgE) and subclasses (such as IgG1, IgG2 etc.).

[0043] The definition of the term “antibody” also includes embodiments such as chimeric, single chain and humanized antibodies, as well as antibody fragments, like, inter alia, Fab fragments. Antibody fragments or derivatives further comprise F(ab′)₂, Fv, scFv fragments or single domain antibodies, single variable domain antibodies or immunoglobulin single variable domain comprising merely one variable domain, which might be VH or VL, that specifically bind to an antigen or epitope independently of other V regions or domains; see, for example, Harlow and Lane (1988) and (1999), loc. cit. Such immunoglobulin single variable domain encompasses not only an isolated antibody single variable domain polypeptide, but also larger polypeptides that comprise one or more monomers of an antibody single variable domain polypeptide sequence.

[0044] Various procedures are known in the art and may be used for the production of such antibodies and/or fragments. Thus, the (antibody) derivatives can also be produced by peptidomimetics. Further, techniques described for the production of single chain antibodies (see, inter alia, U.S. Pat. No. 4,946,778) can be adapted to produce single chain antibodies specific for elected polypeptide(s). Also, transgenic animals may be used to express humanized or human antibodies specific for polypeptides and fusion proteins of this invention. For the preparation of monoclonal antibodies, any technique, providing antibodies produced by continuous cell line cultures can be used. Examples for such techniques include the hybridoma technique (Köhler and Milstein Nature 256 (1975), 495-497), the trioma technique, the human B-cell hybridoma technique (Kozbor, Immunology Today 4 (1983), 72) and the EBV-hybridoma technique to produce human monoclonal antibodies (Cole et al., Monoclonal Antibodies and Cancer Therapy, Alan R. Liss, Inc. (1985), 77-96). Surface plasmon resonance as employed in the BIAcore system can be used to increase the efficiency of phage antibodies which bind to an epitope of a target polypeptide, such as CD3 epsilon or PSMA (Schier, Human Antibodies Hybridomas 7 (1996), 97-105; Malmborg, J. Immunol. Methods 183 (1995), 7-13). It is also envisaged in the context of this invention that the term “antibody” comprises antibody constructs, which may be expressed in a host as described herein below, e.g. antibody constructs which may be transfected and/or transduced via, inter alia, viruses or plasmid vectors.

[0045] The term “specific interaction” as used in accordance with the present invention means that the binding domain does not or does not significantly cross-react with polypeptides which have similar structure as those bound by the binding domain, and which might be expressed by the same cells as the polypeptide of interest. Cross-reactivity of a panel of binding domains under investigation may be tested, for example, by assessing binding of said panel of binding domains under conventional conditions (see, e.g., Harlow and Lane, Antibodies: A Laboratory Manual, Cold Spring Harbor Laboratory Press, 1988 and Using Antibodies: A Laboratory Manual, Cold Spring Harbor Laboratory Press, 1999). Examples for the specific interaction of a binding domain with a specific antigen comprise the specificity of a ligand for its receptor. Said definition particularly comprises the interaction of ligands, which induce a signal upon binding to its specific receptor. Examples for said interaction, which is also particularly comprised by said definition, is the interaction of an antigenic determinant (epitope) with the binding domain (antigenic binding site) of an antibody.

[0046] The term “cross-species specificity” or “interspecies specificity” as used herein means binding of a binding domain described herein to the same target molecule in humans and non-chimpanzee primates. Thus, “cross-species specificity” or “interspecies specificity” is to be understood as an interspecies reactivity to the same molecule “X” expressed in different species, but not to a molecule other than “X”. Cross-species specificity of a monoclonal antibody recognizing e.g. human CD3 epsilon, to a non-chimpanzee primate CD3 epsilon, e.g. macaque CD3 epsilon, can be determined, for instance, by FACS analysis. The FACS analysis is carried out in a way that the respective monoclonal antibody is tested for binding to human and non-chimpanzee primate cells, e.g. macaque cells, expressing said human and non-chimpanzee primate CD3 epsilon antigens, respectively. An appropriate assay is shown in the following examples. The above-mentioned subject matter applies mutatis mutandis for the PSMA antigen: Cross-species specificity of a monoclonal antibody recognizing e.g. human PSMA, to a non-chimpanzee primate PSMA, e.g. macaque PSMA, can be determined, for instance, by FACS analysis. The FACS analysis is carried out in a way that the respective monoclonal antibody is tested for binding to human and non-chimpanzee primate cells, e.g. macaque cells, expressing said human and non-chimpanzee primate PSMA antigens, respectively.

[0047] As used herein, CD3 epsilon denotes a molecule expressed as part of the T cell receptor and has the meaning as typically ascribed to it in the prior art. In human, it encompasses in individual or independently combined form all known CD3 subunits, for example CD3 epsilon, CD3 delta, CD3 gamma, CD3 zeta, CD3 alpha and CD3 beta. The non-chimpanzee primate, non-human CD3 antigens as referred to herein are, for example, Macaca fascicularis CD3 and Macaca mulatta CD3. In Macaca fascicularis, it encompasses CD3 epsilon FN-18 negative and CD3 epsilon FN-18 positive, CD3 gamma and CD3 delta. In Macaca mulatta, it encompasses CD3 epsilon, CD3 gamma and CD3 delta. Preferably, said CD3 as used herein is CD3 epsilon.

[0048] The human CD3 epsilon is indicated in GenBank Accession No. NM_{—}000733 and comprises SEQ ID NO. 1. The human CD3 gamma is indicated in GenBank Accession NO. NM_{—}000073. The human CD3 delta is indicated in GenBank Accession No. NM_{—}000732.

[0049] The CD3 epsilon “FN-18 negative” of Macaca fascicularis (i.e. CD3 epsilon not recognized by monoclonal antibody FN-18 due to a polymorphism as set forth above) is indicated in GenBank Accession No. AB073994.

[0050] The CD3 epsilon “FN-18 positive” of Macaca fascicularis (i.e. CD3 epsilon recognized by monoclonal antibody FN-18) is indicated in GenBank Accession No. AB073993. The CD3 gamma of Macaca fascicularis is indicated in GenBank Accession No. AB073992. The CD3 delta of Macaca fascicularis is indicated in GenBank Accession No. AB073991.

[0051] The nucleic acid sequences and amino acid sequences of the respective CD3 epsilon, gamma and delta homologs of Macaca mulatta can be identified and isolated by recombinant techniques described in the art (Sambrook et al. Molecular Cloning: A Laboratory Manual; Cold Spring Harbor Laboratory Press, 3^{rd} edition 2001). This applies mutatis mutandis to the CD3 epsilon, gamma and delta homologs of other non-chimpanzee primates as defined herein. The identification of the amino acid sequence of Callithrix jacchus, Saimiri sciureus and Saguinus oedipus is described in the appended examples. The amino acid sequence of the extracellular domain of the CD3 epsilon of Callithrix jacchus is depicted in SEQ ID NO: 3, the one of Saguinus oedipus is depicted in SEQ ID NO: 5 and the one of Saimiri sciureus is depicted in SEQ ID NO: 7.

[0052] The human PSMA is indicated in GenBank Accession No. ‘AY101595’. The cloning of the PSMA homolog of macaque is demonstrated in the following examples, the corresponding cDNA and amino acid sequences are shown in SEQ ID NOs. 385 and 386, respectively.

[0053] In line with the above, the term “epitope” defines an antigenic determinant, which is specifically bound/identified by a binding domain as defined herein. The binding domain may specifically bind to/interact with conformational or continuous epitopes, which are unique for the target structure, e.g. the human and non-chimpanzee primate CD3 epsilon chain or the human and non-chimpanzee primate PSMA. A conformational or discontinuous epitope is characterized for polypeptide antigens by the presence of two or more discrete amino acid residues which are separated in the primary sequence, but come together on the surface of the molecule when the polypeptide folds into the native protein/antigen (Sela, (1969) Science 166, 1365 and Layer, (1990) Cell 61, 553-6). The two or more discrete amino acid residues contributing to the epitope are present on separate sections of one or more polypeptide chain(s). These residues come together on the surface of the molecule when the polypeptide chain(s) fold(s) into a three-dimensional structure to constitute the epitope. In contrast, a continuous or linear epitope consists of two or more discrete amino acid residues, which are present in a single linear segment of a polypeptide chain. Within the present invention, a “context-dependent” CD3 epitope refers to the conformation of said epitope. Such a context-dependent epitope, localized on the epsilon chain of CD3, can only develop its correct conformation if it is embedded within the rest of the epsilon chain and held in the right position by heterodimerization of the epsilon chain with either CD3 gamma or delta chain. In contrast, a context-independent CD3 epitope as provided herein refers to an N-terminal 1-27 amino acid residue polypeptide or a functional fragment thereof of CD3 epsilon. This N-terminal 1-27 amino acid residue polypeptide or a functional fragment thereof maintains its three-dimensional structural integrity and correct conformation when taken out of its native environment in the CD3 complex. The context-independency of the N-terminal 1-27 amino acid residue polypeptide or a functional fragment thereof, which is part of the extracellular domain of CD3 epsilon, represents, thus, an epitope which is completely different to the epitopes of CD3 epsilon described in connection with a method for the preparation of human binding molecules in WO 2004/106380. Said method used solely expressed recombinant CD3 epsilon. The conformation of this solely expressed recombinant CD3 epsilon differed from that adopted in its natural form, that is, the form in which the CD3 epsilon subunit of the TCR/CD3 complex exists as part of a noncovalent complex with either the CD3 delta or the CD3-gamma subunit of the TCR/CD3 complex. When such solely expressed recombinant CD3 epsilon protein is used as an antigen for selection of antibodies from an antibody library, antibodies specific for this antigen are identified from the library although such a library does not contain antibodies with specificity for self-antigens/autoantigens. This is due to the fact that solely expressed recombinant CD3 epsilon protein does not exist in vivo; it is not an autoantigen. Consequently, subpopulations of B cells expressing antibodies specific for this protein have not been depleted in vivo; an antibody library constructed from such B cells would contain genetic material for antibodies specific for solely expressed recombinant CD3 epsilon protein.

[0054] However, since the context-independent N-terminal 1-27 amino acid residue polypeptide or a functional fragment thereof is an epitope, which folds in its native form, binding domains in line with the present invention cannot be identified by methods based on the approach described in WO 2004/106380. Therefore, it could be verified in tests that binding molecules as disclosed in WO 2004/106380 are not capable of binding to the N-terminal 1-27 amino acid residues of the CD3 epsilon chain. Hence, conventional anti-CD3 binding molecules or anti-CD3 antibody molecules (e.g. as disclosed in WO 99/54440) bind CD3 epsilon chain at a position which is more C-terminally located than the context-independent N-terminal 1-27 amino acid residue polypeptide or a functional fragment provided herein. Prior art antibody molecules OKT3 and UCHT-1 have also a specificity for the epsilon-subunit of the TCR/CD3 complex between amino acid residues 35 to 85 and, accordingly, the epitope of these antibodies is also more C-terminally located. In addition, UCHT-1 binds to the CD3 epsilon chain in a region between amino acid residues 43 to 77 (Tunnacliffe, Int. Immunol. 1 (1989), 546-50; Kjer-Nielsen, PNAS 101, (2004), 7675-7680; Salmeron, J. Immunol. 147 (1991), 3047-52). Therefore, prior art anti-CD3 molecules do not bind to and are not directed against the herein defined context-independent N-terminal 1-27 amino acid residue epitope (or a functional fragment thereof). In particular, the state of the art fails to provide anti-CD3 molecules which specifically binds to the context-independent N-terminal 1-27 amino acid residue epitope and which are cross-species specific, i.e. bind to human and non-chimpanzee primate CD3 epsilon.

[0055] For the generation of a, preferably human, binding domain comprised in a bispecific single chain antibody molecule of the invention, e.g. monoclonal antibodies binding to both the human and non-chimpanzee primate CD3 epsilon (e.g. macaque CD3 epsilon) or monoclonal antibodies binding to both the human and non-chimpanzee primate PSMA can be used.

[0056] As used herein, “human” and “man” refers to the species Homo sapiens. As far as the medical uses of the constructs described herein are concerned, human patients are to be treated with the same molecule.

[0057] It is preferred that at least one of said first or second binding domains of the bispecific single chain antibody of the invention is CDR-grafted, humanized or human. Preferably, both the first and second binding domains of the bispecific single chain antibody of the invention are CDR-grafted, humanized or human.

[0058] The term “human” antibody as used herein is to be understood as meaning that the bispecific single chain antibody as defined herein, comprises (an) amino acid sequence(s) contained in the human germline antibody repertoire. For the purposes of definition herein, said bispecific single chain antibody may therefore be considered human if it consists of such (a) human germline amino acid sequence(s), i.e. if the amino acid sequence(s) of the bispecific single chain antibody in question is (are) identical to (an) expressed human germline amino acid sequence(s). A bispecific single chain antibody as defined herein may also be regarded as human if it consists of (a) sequence(s) that deviate(s) from its (their) closest human germline sequence(s) by no more than would be expected due to the imprint of somatic hypermutation. Additionally, the antibodies of many non-human mammals, for example rodents such as mice and rats, comprise VH CDR3 amino acid sequences which one may expect to exist in the expressed human antibody repertoire as well. Any such sequence(s) of human or non-human origin which may be expected to exist in the expressed human repertoire would also be considered “human” for the purposes of the present invention.

[0059] As used herein, the term “humanized”, “humanization”, “human-like” or grammatically related variants thereof are used interchangeably to refer to a bispecific single chain antibody comprising in at least one of its binding domains at least one complementarity determining region (“CDR”) from a non-human antibody or fragment thereof. Humanization approaches are described for example in WO 91/09968 and U.S. Pat. No. 6,407,213. As non-limiting examples, the term encompasses the case in which a variable region of at least one binding domain comprises a single CDR region, for example the third CDR region of the VH (CDRH3), from another non-human animal, for example a rodent, as well as the case in which a or both variable region/s comprise at each of their respective first, second and third CDRs the CDRs from said non-human animal. In the event that all CDRs of a binding domain of the bispecific single chain antibody have been replaced by their corresponding equivalents from, for example, a rodent, one typically speaks of “CDR-grafting”, and this term is to be understood as being encompassed by the term “humanized” or grammatically related variants thereof as used herein. The term “humanized” or grammatically related variants thereof also encompasses cases in which, in addition to replacement of one or more CDR regions within a VH and/or VL of the first and/or second binding domain further mutation/s (e.g. substitutions) of at least one single amino acid residue/s within the framework (“FR”) regions between the CDRs has/have been effected such that the amino acids at that/those positions correspond/s to the amino acid/s at that/those position/s in the animal from which the CDR regions used for replacement is/are derived. As is known in the art, such individual mutations are often made in the framework regions following CDR-grafting in order to restore the original binding affinity of the non-human antibody used as a CDR-donor for its target molecule. The term “humanized” may further encompass (an) amino acid substitution(s) in the CDR regions from a non-human animal to the amino acid(s) of a corresponding CDR region from a human antibody, in addition to the amino acid substitutions in the framework regions as described above.

[0060] As used herein, the term “homolog” or “homology” is to be understood as follows: Homology among proteins and DNA is often concluded on the basis of sequence similarity, especially in bioinformatics. For example, in general, if two or more genes have highly similar DNA sequences, it is likely that they are homologous. But sequence similarity may arise from different ancestors: short sequences may be similar by chance, and sequences may be similar because both were selected to bind to a particular protein, such as a transcription factor. Such sequences are similar but not homologous. Sequence regions that are homologous are also called conserved. This is not to be confused with conservation in amino acid sequences in which the amino acid at a specific position has changed but the physio-chemical properties of the amino acid remain unchanged. Homologous sequences are of two types: orthologous and paralogous. Homologous sequences are orthologous if they were separated by a speciation event: when a species diverges into two separate species, the divergent copies of a single gene in the resulting species are said to be orthologous. Orthologs, or orthologous genes, are genes in different species that are similar to each other because they originated from a common ancestor. The strongest evidence that two similar genes are orthologous is the result of a phylogenetic analysis of the gene lineage. Genes that are found within one Glade are orthologs, descended from a common ancestor. Orthologs often, but not always, have the same function. Orthologous sequences provide useful information in taxonomic classification studies of organisms. The pattern of genetic divergence can be used to trace the relatedness of organisms. Two organisms that are very closely related are likely to display very similar DNA sequences between two orthologs. Conversely, an organism that is further removed evolutionarily from another organism is likely to display a greater divergence in the sequence of the orthologs being studied. Homologous sequences are paralogous if they were separated by a gene duplication event: if a gene in an organism is duplicated to occupy two different positions in the same genome, then the two copies are paralogous. A set of sequences that are paralogous are called paralogs of each other. Paralogs typically have the same or similar function, but sometimes do not: due to lack of the original selective pressure upon one copy of the duplicated gene, this copy is free to mutate and acquire new functions. An example can be found in rodents such as rats and mice. Rodents have a pair of paralogous insulin genes, although it is unclear if any divergence in function has occurred. Paralogous genes often belong to the same species, but this is not necessary: for example, the hemoglobin gene of humans and the myoglobin gene of chimpanzees are paralogs. This is a common problem in bioinformatics: when genomes of different species have been sequenced and homologous genes have been found, one can not immediately conclude that these genes have the same or similar function, as they could be paralogs whose function has diverged.

[0061] As used herein, a “non-chimpanzee primate” or “non-chimp primate” or grammatical variants thereof refers to any primate animal (i.e. not human) other than chimpanzee, i.e. other than an animal of belonging to the genus Pan, and including the species Pan paniscus and Pan troglodytes, also known as Anthropopithecus troglodytes or Simia satyrus. It will be understood, however, that it is possible that the antibodies of the invention can also bind with their first and/or second binding domain to the respective epitopes/fragments etc. of said chimpanzees. The intention is merely to avoid animal tests which are carried out with chimpanzees, if desired. It is thus also envisaged that in another embodiment the antibodies of the present invention also bind with their first and/or second binding domain to the respective epitopes of chimpanzees. A “primate”, “primate species”, “primates” or grammatical variants thereof denote/s an order of eutherian mammals divided into the two suborders of prosimians and anthropoids and comprising apes, monkeys and lemurs. Specifically, “primates” as used herein comprises the suborder Strepsirrhini (non-tarsier prosimians), including the infraorder Lemuriformes (itself including the superfamilies Chemogaleoidea and Lemuroidea), the infraorder Chiromyiformes (itself including the family Daubentoniidae) and the infraorder Lorisiformes (itself including the families Lorisidae and Galagidae). “Primates” as used herein also comprises the suborder Haplorrhini, including the infraorder Tarsiiformes (itself including the family Tarsiidae), the infraorder Simiiformes (itself including the Platyrrhini, or New-World monkeys, and the Catarrhini, including the Cercopithecidea, or Old-World Monkeys).

[0062] The non-chimpanzee primate species may be understood within the meaning of the invention to be a lemur, a tarsier, a gibbon, a marmoset (belonging to New-World Monkeys of the family Cebidae) or an Old-World Monkey (belonging to the superfamily Cercopithecoidea).

[0063] As used herein, an “Old-World Monkey” comprises any monkey falling in the superfamily Cercopithecoidea, itself subdivided into the families: the Cercopithecinae, which are mainly African but include the diverse genus of macaques which are Asian and North African; and the Colobinae, which include most of the Asian genera but also the African colobus monkeys.

[0064] Specifically, within the subfamily Cercopithecinae, an advantageous non-chimpanzee primate may be from the Tribe Cercopithecini, within the genus Allenopithecus (Allen's Swamp Monkey, Allenopithecus nigroviridis); within the genus Miopithecus (Angolan Talapoin, Miopithecus talapoin; Gabon Talapoin, Miopithecus ogouensis); within the genus Erythrocebus (Patas Monkey, Erythrocebus patas); within the genus Chlorocebus (Green Monkey, Chlorocebus sabaceus; Grivet, Chlorocebus aethiops; Bale Mountains Vervet, Chlorocebus djamdjamensis; Tantalus Monkey, Chlorocebus tantalus; Vervet Monkey, Chlorocebus pygerythrus; Malbrouck, Chlorocebus cynosuros); or within the genus Cercopithecus (Dryas Monkey or Salongo Monkey, Cercopithecus dryas; Diana Monkey, Cercopithecus diana; Roloway Monkey, Cercopithecus roloway; Greater Spot-nosed Monkey, Cercopithecus nictitans; Blue Monkey, Cercopithecus mitis; Silver Monkey, Cercopithecus doggetti; Golden Monkey, Cercopithecus kandti; Sykes's Monkey, Cercopithecus albogularis; Mona Monkey, Cercopithecus mona; Campbell's Mona Monkey, Cercopithecus campbelli; Lowe's Mona Monkey, Cercopithecus lowei; Crested Mona Monkey, Cercopithecus pogonias; Wolfs Mona Monkey, Cercopithecus wolfi; Dent's Mona Monkey, Cercopithecus denti; Lesser Spot-nosed Monkey, Cercopithecus petaurista; White-throated Guenon, Cercopithecus erythrogaster; Sclater's Guenon, Cercopithecus sclateri; Red-eared Guenon, Cercopithecus erythrotis; Moustached Guenon, Cercopithecus cephus; Red-tailed Monkey, Cercopithecus ascanius; L′Hoest's Monkey, Cercopithecus lhoesti; Preuss's Monkey, Cercopithecus preussi; Sun-tailed Monkey, Cercopithecus solatus; Hamlyn's Monkey or Owl-faced Monkey, Cercopithecus hamlyni; De Brazza's Monkey, Cercopithecus neglectus).

[0065] Alternatively, an advantageous non-chimpanzee primate, also within the subfamily Cercopithecinae but within the Tribe Papionini, may be from within the genus Macaca (Barbary Macaque, Macaca sylvanus; Lion-tailed Macaque, Macaca silenus; Southern Pig-tailed Macaque or Beruk, Macaca nemestrina; Northern Pig-tailed Macaque, Macaca leonina; Pagai Island Macaque or Bokkoi, Macaca pagensis; Siberut Macaque, Macaca siberu; Moor Macaque, Macaca maura; Booted Macaque, Macaca ochreata; Tonkean Macaque, Macaca tonkeana; Heck's Macaque, Macaca hecki; Gorontalo Macaque, Macaca nigriscens; Celebes Crested Macaque or Black “Ape”, Macaca nigra; Cynomolgus monkey or Crab-eating Macaque or Long-tailed Macaque or Kera, Macaca fascicularis; Stump-tailed Macaque or Bear Macaque, Macaca arctoides; Rhesus Macaque, Macaca mulatta; Formosan Rock Macaque, Macaca cyclopis; Japanese Macaque, Macaca fuscata; Toque Macaque, Macaca sinica; Bonnet Macaque, Macaca radiata; Barbary Macaque, Macaca sylvanmus; Assam Macaque, Macaca assamensis; Tibetan Macaque or Milne-Edwards' Macaque, Macaca thibetana; Arunachal Macaque or Munzala, Macaca munzala); within the genus Lophocebus (Gray-cheeked Mangabey, Lophocebus albigena; Lophocebus albigena albigena; Lophocebus albigena osmani; Lophocebus albigena johnstoni; Black Crested Mangabey, Lophocebus aterrimus; Opdenbosch's Mangabey, Lophocebus opdenboschi; Highland Mangabey, Lophocebus kipunji); within the genus Papio (Hamadryas Baboon, Papio hamadryas; Guinea Baboon, Papio papio; Olive Baboon, Papio anubis; Yellow Baboon, Papio cynocephalus; Chacma Baboon, Papio ursinus); within the genus Theropithecus (Gelada, Theropithecus gelada); within the genus Cercocebus (Sooty Mangabey, Cercocebus atys; Cercocebus atys atys; Cercocebus atys lunulatus; Collared Mangabey, Cercocebus torquatus; Agile Mangabey, Cercocebus agilis; Golden-bellied Mangabey, Cercocebus chrysogaster; Tana River Mangabey, Cercocebus galeritus; Sanje Mangabey, Cercocebus sanjei); or within the genus Mandrillus (Mandrill, Mandrillus sphinx; Drill, Mandrillus leucophaeus).

[0066] Most preferred is Macaca fascicularis (also known as Cynomolgus monkey and, therefore, in the Examples named “Cynomolgus”) and Macaca mulatta (rhesus monkey, named “rhesus”).

[0067] Within the subfamily Colobinae, an advantageous non-chimpanzee primate may be from the African group, within the genus Colobus (Black Colobus, Colobus satanas; Angola Colobus, Colobus angolensis; King Colobus, Colobus polykomos; Ursine Colobus, Colobus vellerosus; Mantled Guereza, Colobus guereza); within the genus Piliocolobus (Western Red Colobus, Piliocolobus badius; Piliocolobus badius badius; Piliocolobus badius temminckii; Piliocolobus badius waldronae; Pennant's Colobus, Piliocolobus pennantii; Piliocolobus pennantii pennantii; Piliocolobus pennantii epieni; Piliocolobus pennantii bouvieri; Preuss's Red Colobus, Piliocolobus preussi; Thollon's Red Colobus, Piliocolobus tholloni; Central African Red Colobus, Piliocolobus foal; Piliocolobus foai foal; Piliocolobus foai ellioti; Piliocolobus foai oustaleti; Piliocolobus foai semlikiensis; Piliocolobus foai parmentierorum; Ugandan Red Colobus, Piliocolobus tephrosceles; Uzyngwa Red Colobus, Piliocolobus gordonorum; Zanzibar Red Colobus, Piliocolobus kirkii; Tana River Red Colobus, Piliocolobus rufomitratus); or within the genus Procolobus (Olive Colobus, Procolobus verus). Within the subfamily Colobinae, an advantageous non-chimpanzee primate may alternatively be from the Langur (leaf monkey) group, within the genus Semnopithecus (Nepal Gray Langur, Semnopithecus schistaceus; Kashmir Gray Langur, Semnopithecus ajax; Tarai Gray Langur, Semnopithecus hector; Northern Plains Gray Langur, Semnopithecus entellus; Black-footed Gray Langur, Semnopithecus hypoleucos; Southern Plains Gray Langur, Semnopithecus dussumieri; Tufted Gray Langur, Semnopithecus priam); within the T. vetulus group or the genus Trachypithecus (Purple-faced Langur, Trachypithecus vetulus; Nilgiri Langur, Trachypithecus johnii); within the T. cristatus group of the genus Trachypithecus (Javan Lutung, Trachypithecus auratus; Silvery Leaf Monkey or Silvery Lutung, Trachypithecus cristatus; Indochinese Lutung, Trachypithecus germaini; Tenasserim Lutung, Trachypithecus barbei); within the T. obscurus group of the genus Trachypithecus (Dusky Leaf Monkey or Spectacled Leaf Monkey, Trachypithecus obscurus; Phayre's Leaf Monkey, Trachypithecus phayrei); within the T. pileatus group of the genus Trachypithecus (Capped Langur, Trachypithecus pileatus; Shortridge's Langur, Trachypithecus shortridgei; Gee's Golden Langur, Trachypithecus geei); within the T. francoisi group of the genus Trachypithecus (Francois' Langur, Trachypithecus francoisi; Hatinh Langur, Trachypithecus hatinhensis; White-headed Langur, Trachypithecus poliocephalus; Laotian Langur, Trachypithecus laotum; Delacour's Langur, Trachypithecus delacouri; Indochinese Black Langur, Trachypithecus ebenus); or within the genus Presbytis (Sumatran Surili, Presbytis melalophos; Banded Surili, Presbytis femoralis; Sarawak Surili, Presbytis chrysomelas; White-thighed Surili, Presbytis siamensis; White-fronted Surili, Presbytis frontata; Javan Surili, Presbytis comata; Thomas's Langur, Presbytis thomasi; Hose's Langur, Presbytis hosei; Maroon Leaf Monkey, Presbytis rubicunda; Mentawai Langur or Joja, Presbytis potenziani; Natuna Island Surili, Presbytis natunae).

[0068] Within the subfamily Colobinae, an advantageous non-chimpanzee primate may alternatively be from the Odd-Nosed group, within the genus Pygathrix (Red-shanked Douc, Pygathrix nemaeus; Black-shanked Douc, Pygathrix nigripes; Gray-shanked Douc, Pygathrix cinerea); within the genus Rhinopithecus (Golden Snub-nosed Monkey, Rhinopithecus roxellana; Black Snub-nosed Monkey, Rhinopithecus bieti; Gray Snub-nosed Monkey, Rhinopithecus brelichi; Tonkin Snub-nosed Langur, Rhinopithecus avunculus); within the genus Nasalis (Proboscis Monkey, Nasalis larvatus); or within the genus Simias (Pig-tailed Langur, Simias concolor).

[0069] As used herein, the term “marmoset” denotes any New-World Monkeys of the genus Callithrix, for example belonging to the Atlantic marmosets of subgenus Callithrix (sic!) (Common Marmoset, Callithrix (Callithrix) jacchus; Black-tufted Marmoset, Callithrix (Callithrix) penicillata; Wied's Marmoset, Callithrix (Callithrix) kuhlii; White-headed Marmoset, Callithrix (Callithrix) geoffroyi; Buffy-headed Marmoset, Callithrix (Callithrix) flaviceps; Buffy-tufted Marmoset, Callithrix (Callithrix) aurita); belonging to the Amazonian marmosets of subgenus Mico (Rio Acari Marmoset, Callithrix (Mico) acariensis; Manicore Marmoset, Callithrix (Mico) manicorensis; Silvery Marmoset, Callithrix (Mico) argentata; White Marmoset, Callithrix (Mico) leucippe; Emilia's Marmoset, Callithrix (Mico) emiliae; Black-headed Marmoset, Callithrix (Mico) nigriceps; Marca's Marmoset, Callithrix (Mico) marcai; Black-tailed Marmoset, Callithrix (Mico) melanura; Santarem Marmoset, Callithrix (Mico) humeralifera; Maués Marmoset, Callithrix (Mico) mauesi; Gold-and-white Marmoset, Callithrix (Mico) chrysoleuca; Hershkovitz's Marmoset, Callithrix (Mico) intermedia; Satéré Marmoset, Callithrix (Mico) saterei); Roosmalens' Dwarf Marmoset belonging to the subgenus Callibella (Callithrix (Callibella) humilis); or the Pygmy Marmoset belonging to the subgenus Cebuella (Callithrix (Cebuella) pygmaea).

[0070] Other genera of the New-World Monkeys comprise tamarins of the genus Saguinus (comprising the S. oedipus-group, the S. midas group, the S. nigricollis group, the S. mystax group, the S. bicolor group and the S. inustus group) and squirrel monkeys of the genus Samiri (e.g. Saimiri sciureus, Saimiri oerstedii, Saimiri ustus, Saimiri boliviensis, Saimiri vanzolini)

[0071] In a preferred embodiment of the bispecific single chain antibody molecule of the invention, the non-chimpanzee primate is an old world monkey. In a more preferred embodiment of the polypeptide, the old world monkey is a monkey of the Papio genus Macaque genus. Most preferably, the monkey of the Macaque genus is Assamese macaque (Macaca assamensis), Barbary macaque (Macaca sylvanus), Bonnet macaque (Macaca radiata), Booted or Sulawesi-Booted macaque (Macaca ochreata), Sulawesi-crested macaque (Macaca nigra), Formosan rock macaque (Macaca cyclopsis), Japanese snow macaque or Japanese macaque (Macaca fuscata), Cynomologus monkey or crab-eating macaque or long-tailed macaque or Java macaque (Macaca fascicularis), Lion-tailed macaque (Macaca silenus), Pigtailed macaque (Macaca nemestrina), Rhesus macaque (Macaca mulatta), Tibetan macaque (Macaca thibetana), Tonkean macaque (Macaca tonkeana), Toque macaque (Macaca sinica), Stump-tailed macaque or Red-faced macaque or Bear monkey (Macaca arctoides), or Moor macaque (Macaca maurus). Most preferably, the monkey of the Papio genus is Hamadryas Baboon, Papio hamadryas; Guinea Baboon, Papio papio; Olive Baboon, Papio anubis; Yellow Baboon, Papio cynocephalus; Chacma Baboon, Papio ursinus.

[0072] In an alternatively preferred embodiment of the bispecific single chain antibody molecule of the invention, the non-chimpanzee primate is a new world monkey. In a more preferred embodiment of the polypeptide, the new world monkey is a monkey of the Callithrix genus (marmoset), the Saguinus genus or the Samiri genus. Most preferably, the monkey of the Callithrix genus is Callithrix jacchus, the monkey of the Saguinus genus is Saguinus oedipus and the monkey of the Samiri genus is Saimiri sciureus.

[0073] The term “cell surface antigen” as used herein denotes a molecule, which is displayed on the surface of a cell. In most cases, this molecule will be located in or on the plasma membrane of the cell such that at least part of this molecule remains accessible from outside the cell in tertiary form. A non-limiting example of a cell surface molecule, which is located in the plasma membrane is a transmembrane protein comprising, in its tertiary conformation, regions of hydrophilicity and hydrophobicity. Here, at least one hydrophobic region allows the cell surface molecule to be embedded, or inserted in the hydrophobic plasma membrane of the cell while the hydrophilic regions extend on either side of the plasma membrane into the cytoplasm and extracellular space, respectively. Non-limiting examples of cell surface molecules which are located on the plasma membrane are proteins which have been modified at a cysteine residue to bear a palmitoyl group, proteins modified at a C-terminal cysteine residue to bear a farnesyl group or proteins which have been modified at the C-terminus to bear a glycosyl phosphatidyl inositol (“GPI”) anchor. These groups allow covalent attachment of proteins to the outer surface of the plasma membrane, where they remain accessible for recognition by extracellular molecules such as antibodies. Examples of cell surface antigens are CD3 epsilon and PSMA. As described herein above, PSMA is a cell surface antigen which is a target for therapy of cancer, including, but not limited to solid tumors, preferably carcinomas and prostate cancer.

[0074] In light of this, PSMA can also be characterized as a tumor antigen. The term “tumor antigen” as used herein may be understood as those antigens that are presented on tumor cells. These antigens can be presented on the cell surface with an extracellular part, which is often combined with a transmembrane and cytoplasmic part of the molecule. These antigens can sometimes be presented only by tumor cells and never by the normal ones. Tumor antigens can be exclusively expressed on tumor cells or might represent a tumor specific mutation compared to normal cells. In this case, they are called tumor-specific antigens. More common are antigens that are presented by tumor cells and normal cells, and they are called tumor-associated antigens. These tumor-associated antigens can be overexpressed compared to normal cells or are accessible for antibody binding in tumor cells due to the less compact structure of the tumor tissue compared to normal tissue. One example for a tumor antigen in line with the present invention is PSMA.

[0075] As described herein above the bispecific single chain antibody molecule of the invention binds with the first binding domain to an epitope of human and non-chimpanzee primate CD3_{ε} (epsilon) chain, wherein the epitope is part of an amino acid sequence comprised in the group consisting of 27 amino acid residues as depicted in SEQ ID NOs. 2, 4, 6, or 8 or a functional fragment thereof.

[0076] In line with the present invention it is preferred for the bispecific single chain antibody molecule of the invention that said epitope is part of an amino acid sequence comprising 26, 25, 24, 23, 22, 21, 20, 19, 18, 17, 16, 15, 14, 13, 12, 11, 10, 9, 8, 7, 6 or 5 amino acids.

[0077] More preferably, wherein said epitope comprises at least the amino acid sequence Gln-Asp-Gly-Asn-Glu (Q-D-G-N-E).

[0078] Within the present invention, a functional fragment of the N-terminal 1-27 amino acid residues means that said functional fragment is still a context-independent epitope maintaining its three-dimensional structural integrity when taken out of its native environment in the CD3 complex (and fused to a heterologous amino acid sequence such as EpCAM or an immunoglobulin Fc part, e.g. as shown in Example 3.1). The maintenance of the three-dimensional structure within the 27 amino acid N-terminal polypeptide or functional fragment thereof of CD3 epsilon can be used for the generation of binding domains which bind to the N-terminal CD3 epsilon polypeptide fragment in vitro and to the native (CD3 epsilon subunit of the) CD3 complex on T cells in vivo with the same binding affinity. Within the present invention, a functional fragment of the N-terminal 1-27 amino acid residues means that CD3 binding domains provided herein can still bind to such functional fragments in a context-independent manner. The person skilled in the art is aware of methods for epitope mapping to determine which amino acid residues of an epitope are recognized by such anti-CD3 binding domains (e.g. alanine scanning; see appended examples).

[0079] In one embodiment of the invention, the bispecific single chain antibody molecule of the invention comprises a (first) binding domain capable of binding to an epitope of human and non-chimpanzee primate CD3_{ε} chain and a second binding domain capable of binding to the cell surface antigen PSMA.

[0080] Within the present invention it is further preferred that the second binding domain binds to the human cell surface antigen PSMA and/or a non-chimpanzee primate PSMA. Particularly preferred, the second binding domain binds to the human PSMA and a non-chimpanzee primate PSMA, preferably a macaque PSMA. It is to be understood, that the second binding domain binds to at least one non-chimpanzee primate PSMA, however, it may also bind to two, three or more, non-chimpanzee primate PSMA homologs. For example, the second binding domain may bind to the Cynomolgus monkey PSMA and to the Rhesus monkey PSMA.

[0081] The present invention including all methods, uses, kits etc. described herein, also relates to the seconed binding domains as such (i.e. not in the context of a bispecific single chain antibody). “As such” further includes antibody formats other than the bispecific single chain antibodies as described herein, for example antibody fragments (comprising the second domain), humanized antibodies, fusion proteins comprising the second domain etc. Antibody formats other than the bispecific single chain antibodies of the present invention are also described herein above.

[0082] For the generation of the second binding domain of the bispecific single chain antibody molecule of the invention, e.g. bispecific single chain antibodies as defined herein, monoclonal antibodies binding to both of the respective human and/or non-chimpanzee primate cell surface antigen such as PSMA can be utilized. Appropriate binding domains for the bispecific polypeptide as defined herein e.g. can be derived from cross-species specific monoclonal antibodies by recombinant methods described in the art. A monoclonal antibody binding to a human cell surface antigen and to the homolog of said cell surface antigen in a non-chimpanzee primate can be tested by FACS assays as set forth above. It is evident to those skilled in the art that cross-species specific antibodies can also be generated by hybridoma techniques described in the literature (Milstein and Köhler, Nature 256 (1975), 495-7). For example, mice may be alternately immunized with human and non-chimpanzee primate cell surface antigen, such as PSMA. From these mice, cross-species specific antibody-producing hybridoma cells are isolated via hybridoma technology and analysed by FACS as set forth above. The generation and analysis of bispecific polypeptides such as bispecific single chain antibodies exhibiting cross-species specificity as described herein is shown in the following examples. The advantages of the bispecific single chain antibodies exhibiting cross-species specificity include the points enumerated herein.

[0083] It is particularly preferred for the bispecific single chain antibody molecule of the invention that the first binding domain capable of binding to an epitope of human and non-chimpanzee primate CD3_{ε} chain comprises a VL region comprising CDR-L1, CDR-L2 and CDR-L3 selected from:
[0084] (a) CDR-L1 as depicted in SEQ ID NO. 27, CDR-L2 as depicted in SEQ ID NO. 28 and CDR-L3 as depicted in SEQ ID NO. 29;
[0085] (b) CDR-L1 as depicted in SEQ ID NO. 117, CDR-L2 as depicted in SEQ ID NO. 118 and CDR-L3 as depicted in SEQ ID NO. 119; and
[0086] (c) CDR-L1 as depicted in SEQ ID NO. 153, CDR-L2 as depicted in SEQ ID NO. 154 and CDR-L3 as depicted in SEQ ID NO. 155.

[0087] The variable regions, i.e. the variable light chain (“L” or “VL”) and the variable heavy chain (“H” or “VH”) are understood in the art to provide the binding domain of an antibody. This variable regions harbor the complementary determining regions. The term “complementary determining region” (CDR) is well known in the art to dictate the antigen specificity of an antibody. The term “CDR-L” or “L CDR” or “LCDR” refers to CDRs in the VL, whereas the term “CDR-H” or “H CDR” or HCDR″ refers to the CDRs in the VH.

[0088] In an alternatively preferred embodiment of the bispecific single chain antibody molecule of the invention the first binding domain capable of binding to an epitope of human and non-chimpanzee primate CD3_{ε} chain comprises a VH region comprising CDR-H 1, CDR-H2 and CDR-H3 selected from:
[0089] (a) CDR-H1 as depicted in SEQ ID NO. 12, CDR-H2 as depicted in SEQ ID NO. 13 and CDR-H3 as depicted in SEQ ID NO. 14;
[0090] (b) CDR-H1 as depicted in SEQ ID NO. 30, CDR-H2 as depicted in SEQ ID NO. 31 and CDR-H3 as depicted in SEQ ID NO. 32;
[0091] (c) CDR-H1 as depicted in SEQ ID NO. 48, CDR-H2 as depicted in SEQ ID NO. 49 and CDR-H3 as depicted in SEQ ID NO. 50;
[0092] (d) CDR-H1 as depicted in SEQ ID NO. 66, CDR-H2 as depicted in SEQ ID NO. 67 and CDR-H3 as depicted in SEQ ID NO. 68;
[0093] (e) CDR-H1 as depicted in SEQ ID NO. 84, CDR-H2 as depicted in SEQ ID NO. 85 and CDR-H3 as depicted in SEQ ID NO. 86;
[0094] (f) CDR-H1 as depicted in SEQ ID NO. 102, CDR-H2 as depicted in SEQ ID NO. 103 and CDR-H3 as depicted in SEQ ID NO. 104;
[0095] (g) CDR-H1 as depicted in SEQ ID NO. 120, CDR-H2 as depicted in SEQ ID NO. 121 and CDR-H3 as depicted in SEQ ID NO. 122;
[0096] (h) CDR-H1 as depicted in SEQ ID NO. 138, CDR-H2 as depicted in SEQ ID NO. 139 and CDR-H3 as depicted in SEQ ID NO. 140;
[0097] (i) CDR-H1 as depicted in SEQ ID NO. 156, CDR-H2 as depicted in SEQ ID NO. 157 and CDR-H3 as depicted in SEQ ID NO. 158; and
[0098] (j) CDR-H1 as depicted in SEQ ID NO. 174, CDR-H2 as depicted in SEQ ID NO. 175 and CDR-H3 as depicted in SEQ ID NO. 176.

[0099] It is further preferred that the binding domain capable of binding to an epitope of human and non-chimpanzee primate CD3_{ε} chain comprises a VL region selected from the group consisting of a VL region as depicted in SEQ ID NO. 35, 39, 125, 129, 161 or 165.

[0100] It is alternatively preferred that the first binding domain capable of binding to an epitope of human and non-chimpanzee primate CD3_{ε} chain comprises a VH region selected from the group consisting of a VH region as depicted in SEQ ID NO. 15, 19, 33, 37, 51, 55, 69, 73, 87, 91, 105, 109, 123, 127, 141, 145, 159, 163, 177 or 181.

[0101] More preferably, the bispecific single chain antibody molecule of the invention is characterized by the first binding domain capable of binding to an epitope of human and non-chimpanzee primate CD3_{ε} chain, which comprises a VL region and a VH region selected from the group consisting of:
[0102] (a) a VL region as depicted in SEQ ID NO. 17 or 21 and a VH region as depicted in SEQ ID NO. 15 or 19;
[0103] (b) a VL region as depicted in SEQ ID NO. 35 or 39 and a VH region as depicted in SEQ ID NO. 33 or 37;
[0104] (c) a VL region as depicted in SEQ ID NO. 53 or 57 and a VH region as depicted in SEQ ID NO. 51 or 55;
[0105] (d) a VL region as depicted in SEQ ID NO. 71 or 75 and a VH region as depicted in SEQ ID NO. 69 or 73;
[0106] (e) a VL region as depicted in SEQ ID NO. 89 or 93 and a VH region as depicted in SEQ ID NO. 87 or 91;
[0107] (f) a VL region as depicted in SEQ ID NO. 107 or 111 and a VH region as depicted in SEQ ID NO. 105 or 109;
[0108] (g) a VL region as depicted in SEQ ID NO. 125 or 129 and a VH region as depicted in SEQ ID NO. 123 or 127;
[0109] (h) a VL region as depicted in SEQ ID NO. 143 or 147 and a VH region as depicted in SEQ ID NO. 141 or 145;
[0110] (i) a VL region as depicted in SEQ ID NO. 161 or 165 and a VH region as depicted in SEQ ID NO. 159 or 163; and
[0111] (j) a VL region as depicted in SEQ ID NO. 179 or 183 and a VH region as depicted in SEQ ID NO. 177 or 181.

[0112] According to a preferred embodiment of the bispecific single chain antibody molecule of the invention the pairs of VH-regions and VL-regions in the first binding domain binding to CD3 epsilon are in the format of a single chain antibody (scFv). The VH and VL regions are arranged in the order VH-VL or VL-VH. It is preferred that the VH-region is positioned N-terminally to a linker sequence. The VL-region is positioned C-terminally of the linker sequence. Put in other words, the domain arrangement in the CD3 binding domain of the bispecific single chain antibody molecule of the invention is preferably VH-VL, with said CD3 binding domain located C-terminally to the second (cell surface antigen, such as PSMA) binding domain. Preferably the VH-VL comprises or is SEQ ID NO. 185.

[0113] A preferred embodiment of the above described bispecific single chain antibody molecule of the invention is characterized by the first binding domain capable of binding to an epitope of human and non-chimpanzee primate CD3_{ε} chain comprising an amino acid sequence selected from the group consisting of SEQ ID NOs: 23, 25, 41, 43, 59, 61, 77, 79, 95, 97, 113, 115, 131, 133, 149, 151, 167, 169, 185 or 187.

[0114] The invention further relates to an above described bispecific single chain antibody, wherein the second binding domain binds to the cell surface antigen PSMA.

[0115] According to a preferred embodiment of the invention an above characterized bispecific single chain antibody molecule comprises a group of the following sequences as CDR H1, CDR H2, CDR H3, CDR L1, CDR L2 and CDR L3 in the second binding domain selected from the group consisting of:
[0116] a) CDR H1-3 of SEQ ID NO: 394-396 and CDR L1-3 of SEQ ID NO: 389-391,
[0117] b) CDR H1-3 of SEQ ID NO: 408-410 and CDR L1-3 of SEQ ID NO: 403-405;
[0118] c) CDR H1-3 of SEQ ID NO: 422-424 and CDR L1-3 of SEQ ID NO: 417-419;
[0119] d) CDR H1-3 of SEQ ID NO: 436-438 and CDR L1-3 of SEQ ID NO: 431-433;
[0120] e) CDR H1-3 of SEQ ID NO: 445-447 and CDR L1-3 of SEQ ID NO: 450-452;
[0121] f) CDR H1-3 of SEQ ID NO: 464-466 and CDR L1-3 of SEQ ID NO: 459-461 ,
[0122] g) CDR H1-3 of SEQ ID NO: 478-480 and CDR L1-3 of SEQ ID NO: 473-475;
[0123] h) CDR H1-3 of SEQ ID NO: 492-494 and CDR L1-3 of SEQ ID NO: 487-489;
[0124] i) CDR H1-3 of SEQ ID NO: 506-508 and CDR L1-3 of SEQ ID NO: 501-503;
[0125] j) CDR H1-3 of SEQ ID NO: 520-522 and CDR L1-3 of SEQ ID NO: 515-517;
[0126] k) CDR H1-3 of SEQ ID NO: 534-536 and CDR L1-3 of SEQ ID NO: 529-531,
[0127] l) CDR H1-3 of SEQ ID NO: 548-550 and CDR L1-3 of SEQ ID NO: 543-545;
[0128] m) CDR H1-3 of SEQ ID NO: 562-564 and CDR L1-3 of SEQ ID NO: 557-559;
[0129] n) CDR H1-3 of SEQ ID NO: 576-578 and CDR L1-3 of SEQ ID NO: 571-573;
[0130] o) CDR H1-3 of SEQ ID NO: 590-592 and CDR L1-3 of SEQ ID NO: 585-587;
[0131] p) CDR H1-3 of SEQ ID NO: 604-606 and CDR L1-3 of SEQ ID NO: 599-601 ,
[0132] q) CDR H1-3 of SEQ ID NO: 618-620 and CDR L1-3 of SEQ ID NO: 613-615;
[0133] r) CDR H1-3 of SEQ ID NO: 632-634 and CDR L1-3 of SEQ ID NO: 627-629;
[0134] s) CDR H1-3 of SEQ ID NO: 646-648 and CDR L1-3 of SEQ ID NO: 641-643;
[0135] t) CDR H1-3 of SEQ ID NO: 660-662 and CDR L1-3 of SEQ ID NO: 655-657;
[0136] u) CDR H1-3 of SEQ ID NO: 674-676 and CDR L1-3 of SEQ ID NO: 669-671 ,
[0137] v) CDR H1-3 of SEQ ID NO: 688-690 and CDR L1-3 of SEQ ID NO: 683-685;
[0138] w) CDR H1-3 of SEQ ID NO: 702-704 and CDR L1-3 of SEQ ID NO: 697-699;
[0139] x) CDR H1-3 of SEQ ID NO: 716-718 and CDR L1-3 of SEQ ID NO: 711-713; and
[0140] y) CDR H1-3 of SEQ ID NO: 729-731 and CDR L1-3 of SEQ ID NO: 724-726.

[0141] The sequences of the corresponding VL- and VH-regions of the second binding domain of the bispecific single chain antibody molecule of the invention as well as of the respective scFvs are shown in the sequence listing.

[0142] In the bispecific single chain antibody molecule of the invention the binding domains are arranged in the order VL-VH-VH-VL, VL-VH-VL-VH, VH-VL-VH-VL or VH-VL-VL-VH, as exemplified in the appended examples. Preferably, the binding domains are arranged in the order VH PSMA-VL PSMA-VH CD3-VL CD3 or VL PSMA-VH PSMA-VH CD3-VL CD3.

[0143] A particularly preferred embodiment of the invention concerns an above characterized polypeptide, wherein the bispecific single chain antibody molecule comprises a sequence selected from:
[0144] (a) an amino acid sequence as depicted in any of SEQ ID NOs: 399, 413, 427, 441, 455, 469, 483, 497, 511, 525, 539, 553, 567, 581, 595, 609, 623, 637, 651, 665, 679, 693, 707, 721, 734, 799, 817, 863, 849, 835, 785, 899, 935, 1017, 1031, 917, 1003, 953, 971 or 989;
[0145] (b) an amino acid sequence encoded by a nucleic acid sequence as depicted in any of SEQ ID NOs: 400, 414, 428, 442, 456, 470, 484, 498, 512, 526, 540, 554, 568, 582, 596, 610, 624, 638, 652, 666, 680, 694, 708, 736 735, 800, 818, 864, 850, 836, 786, 882, 900, 936, 1018, 1032, 918, 1004, 954, 972, 990, 804, 822, 868, 886, 904, 940, 922, 958 or 976;
[0146] (c) an amino acid sequence at least 90% identical, more preferred at least 95% identical, most preferred at least 96% identical to the amino acid sequence of (a) or (b).

[0147] The invention relates to a bispecific single chain antibody molecule comprising an amino acid sequence as depicted in any of SEQ ID NOs: 399, 413, 427, 441, 455, 469, 483, 497, 511, 525, 539, 553, 567, 581, 595, 609, 623, 637, 651, 665, 679, 693, 707, 721, 734, 799, 817, 863, 849, 835, 785, 899, 935, 1017, 1031, 917, 1003, 953, 971 or 989, as well as to amino acid sequences at least 85% identical, preferably 90%, more preferred at least 95% identical, most preferred at least 96, 97, 98, or 99 identical to the amino acid sequence of SEQ ID NOs: 399, 413, 427, 441, 455, 469, 483, 497, 511, 525, 539, 553, 567, 581, 595, 609, 623, 637, 651, 665, 679, 693, 707, 721, 734, 799, 817, 863, 849, 835, 785, 899, 935, 1017, 1031, 917, 1003, 953, 971 or 989. The invention relates also to the corresponding nucleic acid sequences as depicted in any of SEQ ID NOs: 400, 414, 428, 442, 456, 470, 484, 498, 512, 526, 540, 554, 568, 582, 596, 610, 624, 638, 652, 666, 680, 694, 708, 736 735, 800, 818, 864, 850, 836, 786, 882, 900, 936, 1018, 1032, 918, 1004, 954, 972, 990, 804, 822, 868, 886, 904, 940, 922, 958 or 976 as well as to nucleic acid sequences at least 85% identical, preferably 90%, more preferred at least 95% identical, most preferred at least 96, 97, 98, or 99% identical to the nucleic acid sequences shown in SEQ ID NOs: 400, 414, 428, 442, 456, 470, 484, 498, 512, 526, 540, 554, 568, 582, 596, 610, 624, 638, 652, 666, 680, 694, 708, 736, 735, 800, 818, 864, 850, 836, 786, 882, 900, 936, 1018, 1032, 918, 1004, 954, 972, 990, 804, 822, 868, 886, 904, 940, 922, 958 or 976. It is to be understood that the sequence identity is determined over the entire nucleotide or amino acid sequence. For sequence alignments, for example, the programs Gap or BestFit can be used (Needleman and Wunsch J. Mol. Biol. 48 (1970), 443-453; Smith and Waterman, Adv. Appl. Math 2 (1981), 482-489), which is contained in the GCG software package (Genetics Computer Group, 575 Science Drive, Madison, Wis., USA 53711 (1991). It is a routine method for those skilled in the art to determine and identify a nucleotide or amino acid sequence having e.g. 85% (90%, 95%, 96%, 97%, 98% or 99%) sequence identity to the nucleotide or amino acid sequences of the bispecific single single chain antibody of the invention by using e.g. one of the above mentioned programs. For example, according to Crick's Wobble hypothesis, the 5′ base on the anti-codon is not as spatially confined as the other two bases, and could thus have non-standard base pairing. Put in other words: the third position in a codon triplet may vary so that two triplets which differ in this third position may encode the same amino acid residue. Said hypothesis is well known to the person skilled in the art (see e.g. http://en.wikipedia.org/wiki/Wobble_Hypothesis; Crick, J Mol Biol 19 (1966): 548-55).

[0148] Preferred domain arrangements in the PSMA×CD3 bispecific single chain antibody constructs of the invention are shown in the following examples.

[0149] In a preferred embodiment of the invention, the bispecific single chain antibodies are cross-species specific for CD3 epsilon and for the human and non-chimpanzee primate cell surface antigen PSMA, recognized by their second binding domain.

[0150] In an alternative embodiment the present invention provides a nucleic acid sequence encoding an above described bispecific single chain antibody molecule of the invention.

[0151] The present invention also relates to a vector comprising the nucleic acid molecule of the present invention.

[0152] Many suitable vectors are known to those skilled in molecular biology, the choice of which would depend on the function desired and include plasmids, cosmids, viruses, bacteriophages and other vectors used conventionally in genetic engineering. Methods which are well known to those skilled in the art can be used to construct various plasmids and vectors; see, for example, the techniques described in Sambrook et al. (loc cit.) and Ausubel, Current Protocols in Molecular Biology, Green Publishing Associates and Wiley Interscience, N.Y. (1989), (1994). Alternatively, the polynucleotides and vectors of the invention can be reconstituted into liposomes for delivery to target cells. As discussed in further details below, a cloning vector was used to isolate individual sequences of DNA. Relevant sequences can be transferred into expression vectors where expression of a particular polypeptide is required. Typical cloning vectors include pBluescript SK, pGEM, pUC9, pBR322 and pGBT9. Typical expression vectors include pTRE, pCAL-n-EK, pESP-1, pOP13CAT.

[0153] Preferably said vector comprises a nucleic acid sequence which is a regulatory sequence operably linked to said nucleic acid sequence defined herein.

[0154] The term “regulatory sequence” refers to DNA sequences, which are necessary to effect the expression of coding sequences to which they are ligated. The nature of such control sequences differs depending upon the host organism. In prokaryotes, control sequences generally include promoter, ribosomal binding site, and terminators. In eukaryotes generally control sequences include promoters, terminators and, in some instances, enhancers, transactivators or transcription factors. The term “control sequence” is intended to include, at a minimum, all components the presence of which are necessary for expression, and may also include additional advantageous components.

[0155] The term “operably linked” refers to a juxtaposition wherein the components so described are in a relationship permitting them to function in their intended manner. A control sequence “operably linked” to a coding sequence is ligated in such a way that expression of the coding sequence is achieved under conditions compatible with the control sequences. In case the control sequence is a promoter, it is obvious for a skilled person that double-stranded nucleic acid is preferably used.

[0156] Thus, the recited vector is preferably an expression vector. An “expression vector” is a construct that can be used to transform a selected host and provides for expression of a coding sequence in the selected host. Expression vectors can for instance be cloning vectors, binary vectors or integrating vectors. Expression comprises transcription of the nucleic acid molecule preferably into a translatable mRNA.

[0157] Regulatory elements ensuring expression in prokaryotes and/or eukaryotic cells are well known to those skilled in the art. In the case of eukaryotic cells they comprise normally promoters ensuring initiation of transcription and optionally poly-A signals ensuring termination of transcription and stabilization of the transcript. Possible regulatory elements permitting expression in prokaryotic host cells comprise, e.g., the P_{L}, lac, trp or tac promoter in E. coli, and examples of regulatory elements permitting expression in eukaryotic host cells are the AOX1 or GAL1 promoter in yeast or the CMV-, SV40-, RSV-promoter (Rous sarcoma virus), CMV-enhancer, SV40-enhancer or a globin intron in mammalian and other animal cells.

[0158] Beside elements, which are responsible for the initiation of transcription such regulatory elements may also comprise transcription termination signals, such as the SV40-poly-A site or the tk-poly-A site, downstream of the polynucleotide. Furthermore, depending on the expression system used leader sequences capable of directing the polypeptide to a cellular compartment or secreting it into the medium may be added to the coding sequence of the recited nucleic acid sequence and are well known in the art; see also the appended Examples. The leader sequence(s) is (are) assembled in appropriate phase with translation, initiation and termination sequences, and preferably, a leader sequence capable of directing secretion of translated protein, or a portion thereof, into the periplasmic space or extracellular medium. Optionally, the heterologous sequence can encode a fusion protein including an N-terminal identification peptide imparting desired characteristics, e.g., stabilization or simplified purification of expressed recombinant product; see supra. In this context, suitable expression vectors are known in the art such as Okayama-Berg cDNA expression vector pcDV1 (Pharmacia), pCDM8, pRc/CMV, pcDNA1, pcDNA3 (In-vitrogene), pEF-DHFR, pEF-ADA or pEF-neo (Mack et al. PNAS (1995) 92, 7021-7025 and Raum et al. Cancer Immunol Immunother (2001) 50(3), 141-150) or pSPORT1 (GIBCO BRL).

[0159] Preferably, the expression control sequences will be eukaryotic promoter systems in vectors capable of transforming of transfecting eukaryotic host cells, but control sequences for prokaryotic hosts may also be used. Once the vector has been incorporated into the appropriate host, the host is maintained under conditions suitable for high level expression of the nucleotide sequences, and as desired, the collection and purification of the bispecific single chain antibody molecule of the invention may follow; see, e.g., the appended examples.

[0160] An alternative expression system, which can be used to express a cell cycle interacting protein is an insect system. In one such system, Autographa californica nuclear polyhedrosis virus (AcNPV) is used as a vector to express foreign genes in Spodoptera frugiperda cells or in Trichoplusia larvae. The coding sequence of a recited nucleic acid molecule may be cloned into a nonessential region of the virus, such as the polyhedrin gene, and placed under control of the polyhedrin promoter. Successful insertion of said coding sequence will render the polyhedrin gene inactive and produce recombinant virus lacking coat protein coat. The recombinant viruses are then used to infect S. frugiperda cells or Trichoplusia larvae in which the protein of the invention is expressed (Smith, J. Virol. 46 (1983), 584; Engelhard, Proc. Nat. Acad. Sci. USA 91 (1994), 3224-3227).

[0161] Additional regulatory elements may include transcriptional as well as translational enhancers. Advantageously, the above-described vectors of the invention comprise a selectable and/or scorable marker.

[0162] Selectable marker genes useful for the selection of transformed cells and, e.g., plant tissue and plants are well known to those skilled in the art and comprise, for example, antimetabolite resistance as the basis of selection for dhfr, which confers resistance to methotrexate (Reiss, Plant Physiol. (Life Sci. Adv.) 13 (1994), 143-149); npt, which confers resistance to the aminoglycosides neomycin, kanamycin and paromycin (Herrera-Estrella, EMBO J. 2 (1983), 987-995) and hygro, which confers resistance to hygromycin (Marsh, Gene 32 (1984), 481-485). Additional selectable genes have been described, namely trpB, which allows cells to utilize indole in place of tryptophan; hisD, which allows cells to utilize histinol in place of histidine (Hartman, Proc. Natl. Acad. Sci. USA 85 (1988), 8047); mannose-6-phosphate isomerase which allows cells to utilize mannose (WO 94/20627) and ODC (ornithine decarboxylase) which confers resistance to the ornithine decarboxylase inhibitor, 2-(difluoromethyl)-DL-ornithine, DFMO (McConlogue, 1987, In: Current Communications in Molecular Biology, Cold Spring Harbor Laboratory ed.) or deaminase from Aspergillus terreus which confers resistance to Blasticidin S (Tamura, Biosci. Biotechnol. Biochem. 59 (1995), 2336-2338).

[0163] Useful scorable markers are also known to those skilled in the art and are commercially available. Advantageously, said marker is a gene encoding luciferase (Giacomin, Pl. Sci. 116 (1996), 59-72; Scikantha, J. Bact. 178 (1996), 121), green fluorescent protein (Gerdes, FEBS Lett. 389 (1996), 44-47) or R-glucuronidase (Jefferson, EMBO J. 6 (1987), 3901-3907). This embodiment is particularly useful for simple and rapid screening of cells, tissues and organisms containing a recited vector.

[0164] As described above, the recited nucleic acid molecule can be used alone or as part of a vector to express the bispecific single chain antibody molecule of the invention in cells, for, e.g., purification but also for gene therapy purposes. The nucleic acid molecules or vectors containing the DNA sequence(s) encoding any one of the above described bispecific single chain antibody molecule of the invention is introduced into the cells which in turn produce the polypeptide of interest. Gene therapy, which is based on introducing therapeutic genes into cells by ex-vivo or in-vivo techniques is one of the most important applications of gene transfer. Suitable vectors, methods or gene-delivery systems for in-vitro or in-vivo gene therapy are described in the literature and are known to the person skilled in the art; see, e.g., Giordano, Nature Medicine 2 (1996), 534-539; Schaper, Circ. Res. 79 (1996), 911-919; Anderson, Science 256 (1992), 808-813; Verma, Nature 389 (1994), 239; Isner, Lancet 348 (1996), 370-374; Muhlhauser, Circ. Res. 77 (1995), 1077-1086; Onodera, Blood 91 (1998), 30-36; Verma, Gene Ther. 5 (1998), 692-699; Nabel, Ann. N.Y. Acad. Sci. 811 (1997), 289-292; Verzeletti, Hum. Gene Ther. 9 (1998), 2243-51; Wang, Nature Medicine 2 (1996), 714-716; WO 94/29469; WO 97/00957, U.S. Pat. No. 5,580,859; U.S. Pat. No. 5,589,466; or Schaper, Current Opinion in Biotechnology 7 (1996), 635-640; dos Santos Coura and Nardi Virol J. (2007), 4:99. The recited nucleic acid molecules and vectors may be designed for direct introduction or for introduction via liposomes, or viral vectors (e.g., adenoviral, retroviral) into the cell. Preferably, said cell is a germ line cell, embryonic cell, or egg cell or derived there from, most preferably said cell is a stem cell. An example for an embryonic stem cell can be, inter alia, a stem cell as described in Nagy, Proc. Natl. Acad. Sci. USA 90 (1993), 8424-8428.

[0165] The invention also provides for a host transformed or transfected with a vector of the invention. Said host may be produced by introducing the above described vector of the invention or the above described nucleic acid molecule of the invention into the host. The presence of at least one vector or at least one nucleic acid molecule in the host may mediate the expression of a gene encoding the above described single chain antibody constructs.

[0166] The described nucleic acid molecule or vector of the invention, which is introduced in the host may either integrate into the genome of the host or it may be maintained extrachromosomally.

[0167] The host can be any prokaryote or eukaryotic cell.

[0168] The term “prokaryote” is meant to include all bacteria, which can be transformed or transfected with DNA or RNA molecules for the expression of a protein of the invention. Prokaryotic hosts may include gram negative as well as gram positive bacteria such as, for example, E. coli, S. typhimurium, Serratia marcescens and Bacillus subtilis. The term “eukaryotic” is meant to include yeast, higher plant, insect and preferably mammalian cells. Depending upon the host employed in a recombinant production procedure, the protein encoded by the polynucleotide of the present invention may be glycosylated or may be non-glycosylated. Especially preferred is the use of a plasmid or a virus containing the coding sequence of the bispecific single chain antibody molecule of the invention and genetically fused thereto an N-terminal FLAG-tag and/or C-terminal His-tag. Preferably, the length of said FLAG-tag is about 4 to 8 amino acids, most preferably 8 amino acids. An above described polynucleotide can be used to transform or transfect the host using any of the techniques commonly known to those of ordinary skill in the art. Furthermore, methods for preparing fused, operably linked genes and expressing them in, e.g., mammalian cells and bacteria are well-known in the art (Sambrook, loc cit.). Preferably, said the host is a bacterium or an insect, fungal, plant or animal cell. It is particularly envisaged that the recited host may be a mammalian cell. Particularly preferred host cells comprise CHO cells, COS cells, myeloma cell lines like SP2/0 or NS/0. As illustrated in the appended examples, particularly preferred are CHO-cells as hosts.

[0169] More preferably said host cell is a human cell or human cell line, e.g. per.c6 (Kroos, Biotechnol. Prog., 2003, 19:163-168).

[0170] In a further embodiment, the present invention thus relates to a process for the production of a bispecific single chain antibody molecule of the invention, said process comprising culturing a host of the invention under conditions allowing the expression of the bispecific single chain antibody molecule of the invention and recovering the produced polypeptide from the culture.

[0171] The transformed hosts can be grown in fermentors and cultured according to techniques known in the art to achieve optimal cell growth. The bispecific single chain antibody molecule of the invention can then be isolated from the growth medium, cellular lysates, or cellular membrane fractions. The isolation and purification of the, e.g., microbially expressed bispecific single chain antibody molecules may be by any conventional means such as, for example, preparative chromatographic separations and immunological separations such as those involving the use of monoclonal or polyclonal antibodies directed, e.g., against a tag of the bispecific single chain antibody molecule of the invention or as described in the appended examples.

[0172] The conditions for the culturing of a host, which allow the expression are known in the art to depend on the host system and the expression system/vector used in such process. The parameters to be modified in order to achieve conditions allowing the expression of a recombinant polypeptide are known in the art. Thus, suitable conditions can be determined by the person skilled in the art in the absence of further inventive input.

[0173] Once expressed, the bispecific single chain antibody molecule of the invention can be purified according to standard procedures of the art, including ammonium sulfate precipitation, affinity columns, column chromatography, gel electrophoresis and the like; see, Scopes, “Protein Purification”, Springer-Verlag, N.Y. (1982). Substantially pure polypeptides of at least about 90 to 95% homogeneity are preferred, and 98 to 99% or more homogeneity are most preferred, for pharmaceutical uses. Once purified, partially or to homogeneity as desired, the bispecific single chain antibody molecule of the invention may then be used therapeutically (including extracorporeally) or in developing and performing assay procedures. Furthermore, examples for methods for the recovery of the bispecific single chain antibody molecule of the invention from a culture are described in detail in the appended examples. The recovery can also be achieved by a method for the isolation of the bispecific single chain antibody molecule of the invention capable of binding to an epitope of human and non-chimpanzee primate CD3 epsilon (CD3_{ε}, the method comprising the steps of:

(a) contacting the polypeptide(s) with an N-terminal fragment of the extracellular domain of CD3_{ε} of maximal 27 amino acids comprising the amino acid sequence Gln-Asp-Gly-Asn-Glu-Glu-Met-Gly (SEQ ID NO. 341) or Gln-Asp-Gly-Asn-Glu-Glu-Ile-Gly (SEQ ID NO. 342), fixed via its C-terminus to a solid phase;
(b) eluting the bound polypeptide(s) from said fragment; and
(c) isolating the polypeptide(s) from the eluate of (b).

[0174] It is preferred that the polypeptide(s) isolated by the above method of the invention are of human origin.

[0175] This method or the isolation of the bispecific single chain antibody molecule of the invention is understood as a method for the isolation of one or more different polypeptides with the same specificity for the fragment of the extracellular domain of CD3_{ε} comprising at its N-terminus the amino acid sequence Gln-Asp-Gly-Asn-Glu-Glu-Met-Gly (SEQ ID NO. 341) or Gln-Asp-Gly-Asn-Glu-Glu-Ile-Gly (SEQ ID NO. 342) from a plurality of polypeptide candidates as well as a method for the purification of a polypeptide from a solution. A non-limiting example for the latter method for the purification of a bispecific single chain antibody molecule from a solution is e.g. the purification of a recombinantly expressed bispecific single chain antibody molecule from a culture supernatant or a preparation from such culture. As stated above the fragment used in this method is an N-terminal fragment of the extracellular domain of the primate CD3_{ε} molecule. The amino acid sequence of the extracellular domain of the CD3_{ε} molecule of different species is depicted in SEQ ID NOs: 1, 3, 5 and 7. The two forms of the N-terminal octamer are depicted in SEQ ID NOs: 341 and 342. It is preferred that this N-terminus is freely available for binding of the polypeptides to be identified by the method of the invention. The term “freely available” is understood in the context of the invention as free of additional motives such as a His-tag. The interference of such a His-tag with a binding molecule identified by the method of the invention is described in the appended Examples 6 and 20.

[0176] According to this method said fragment is fixed via its C-terminus to a solid phase. The person skilled in the art will easily and without any inventive ado elect a suitable solid phase support dependent from the used embodiment of the method of the invention. Examples for a solid support comprise but are not limited to matrices like beads (e.g. agarose beads, sepharose beads, polystyrol beads, dextran beads), plates (culture plates or MultiWell plates) as well as chips known e.g. from Biacore®. The selection of the means and methods for the fixation/immobilization of the fragment to said solid support depend on the election of the solid support. A commonly used method for the fixation/immobilization is a coupling via an N-hydroxysuccinimide (NHS) ester. The chemistry underlying this coupling as well as alternative methods for the fixation/immobilization are known to the person skilled in the art, e.g. from Hermanson “Bioconjugate Techniques”, Academic Press, Inc. (1996). For the fixation to/immobilization on chromatographic supports the following means are commonly used: NHS-activated sepharose (e.g. HiTrap-NHS of GE Life Science-Amersham), CnBr-activated sepharose (e.g. GE Life Science-Amersham), NHS-activated dextran beads (Sigma) or activated polymethacrylate. These reagents may also be used in a batch approach. Moreover, dextran beads comprising iron oxide (e.g. available from Miltenyi) may be used in a batch approach. These beads may be used in combination with a magnet for the separation of the beads from a solution. Polypeptides can be immobilized on a Biacore chip (e.g. CM5 chips) by the use of NHS activated carboxymethyldextran. Further examples for an appropriate solid support are amine reactive MultiWell plates (e.g. Nunc Immobilizer™ plates). According to this method said fragment of the extracellular domain of CD3 epsilon can be directly coupled to the solid support or via a stretch of amino acids, which might be a linker or another protein/polypeptide moiety. Alternatively, the extracellular domain of CD3 epsilon can be indirectly coupled via one or more adaptor molecule(s).

[0177] Means and methods for the eluation of a peptide or polypeptide bound to an immobilized epitope are well known in the art. The same holds true for methods for the isolation of the identified polypeptide(s) from the eluate. A method for the isolation of one or more different bispecific single chain antibody molecule(s) with the same specificity for the fragment of the extracellular domain of CD3_{ε} comprising at its N-terminus the amino acid sequence Gln-Asp-Gly-Asn-Glu-Glu-X-Gly (with X being Met or Ile) from a plurality of polypeptide candidates may comprise one or more steps of the following methods for the selection of antigen-specific entities:

CD3_{ε} specific binding domains can be selected from antibody derived repertoires. A phage display library can be constructed based on standard procedures, as for example disclosed in “Phage Display: A Laboratory Manual”; Ed. Barbas, Burton, Scott & Silverman; Cold Spring Harbor Laboratory Press, 2001. The format of the antibody fragments in the antibody library can be scFv, but may generally also be a Fab fragment or even a single domain antibody fragment. For the isolation of antibody fragments naïve antibody fragment libraries may be used. For the selection of potentially low immunogenic binding entities in later therapeutic use, human antibody fragment libraries may be favourable for the direct selection of human antibody fragments. In some cases they may form the basis for synthetic antibody libraries (Knappik et al. J. Mol. Biol. 2000, 296:57 if). The corresponding format may be Fab, scFv (as described below) or domain antibodies (dAbs, as reviewed in Holt et al., Trends Biotechnol. 2003, 21:484 if).

[0178] It is also known in the art that in many cases there is no immune human antibody source available against the target antigen. Therefore animals are immunized with the target antigen and the respective antibody libraries isolated from animal tissue as e.g. spleen or PBMCs. The N-terminal fragment may be biotinylated or covalently linked to proteins like KLH or bovine serum albumin (BSA). According to common approaches rodents are used for immunization. Some immune antibody repertoires of non-human origin may be especially favourable for other reasons, e.g. for the presence of single domain antibodies (VHH) derived from cameloid species (as described in Muyldermans, J. Biotechnol. 74:277; De Genst et al. Dev Como Immunol. 2006, 30:187 ff). Therefore a corresponding format of the antibody library may be Fab, scFv (as described below) or single domain antibodies (VHH). In one possible approach ten weeks old F1 mice from balb/c×C57 black crossings can be immunized with whole cells e.g. expressing transmembrane EpCAM N-terminally displaying as translational fusion the N-terminal amino acids 1 to 27 of the mature CD3_{ε} chain. Alternatively, mice can be immunized with 1-27 CD3 epsilon-Fc fusion protein (a corresponding approach is described in the appended Example 2). After booster immunization(s), blood samples can be taken and antibody serum titer against the CD3-positive T cells can be tested e.g. in FACS analysis. Usually, serum titers are significantly higher in immunized than in non-immunized animals. Immunized animals may form the basis for the construction of immune antibody libraries. Examples of such libraries comprise phage display libraries. Such libraries may be generally constructed based on standard procedures, as for example disclosed in “Phage Display: A Laboratory Manual”; Ed. Barbas, Burton, Scott & Silverman; Cold Spring Harbor Laboratory Press, 2001.

[0179] The non-human antibodies can also be humanized via phage display due to the generation of more variable antibody libraries that can be subsequently enriched for binders during selection.

[0180] In a phage display approach any one of the pools of phages that displays the antibody libraries forms a basis to select binding entities using the respective antigen as target molecule. The central step in which antigen specific, antigen bound phages are isolated is designated as panning. Due to the display of the antibody fragments on the surface of the phages, this general method is called phage display. One preferred method of selection is the use of small proteins such as the filamentous phage N2 domain translationally fused to the N-terminus of the scFv displayed by the phage. Another display method known in the art, which may be used to isolate binding entities is the ribosome display method (reviewed in Groves & Osbourn, Expert Opin Biol Ther. 2005, 5:125 ff; Lipovsek & Pluckthun, J Immunol Methods 2004, 290:52 if). In order to demonstrate binding of scFv phage particles to a 1-27 CD3ε-Fc fusion protein a phage library carrying the cloned scFv-repertoire can be harvested from the respective culture supernatant by PEG (polyethyleneglycole). ScFv phage particles may be incubated with immobilized CD3_{ε} Fc fusion protein. The immobilized CD3_{ε} Fc fusion protein may be coated to a solid phase. Binding entities can be eluted and the eluate can be used for infection of fresh uninfected bacterial hosts. Bacterial hosts successfully transduced with a phagemid copy, encoding a human scFv-fragment, can be selected again for carbenicillin resistance and subsequently infected with e.g. VCMS 13 helper phage to start the second round of antibody display and in vitro selection. A total of 4 to 5 rounds of selections is carried out, normally. The binding of isolated binding entities can be tested on CD3 epsilon positive Jurkat cells, HPBaII cells, PBMCs or transfected eukaryotic cells that carry the N-terminal CD3_{ε} sequence fused to surface displayed EpCAM using a flow cytometric assay (see appended Example 4).

[0181] Preferably, the above method may be a method, wherein the fragment of the extracellular domain of CD3_{ε} consists of one or more fragments of a polypeptide having an amino acid sequence of any one depicted in SEQ ID NOs. 2, 4, 6 or 8. More preferably, said fragment is 8, 9, 10, 11, 12, 13, 14, 15, 16, 17, 18, 19, 20, 21, 22, 23, 24, 25, 26, 27 amino acid residues in length.

[0182] This method of identification of a bispecific single chain antibody molecule may be a method of screening a plurality of bispecific single chain antibody molecules comprising a cross-species specific binding domain binding to an epitope of human and non-chimpanzee primate CD3_{ε}. Alternatively, the method of identification is a method of purification/isolation of a bispecific single chain antibody molecule comprising a cross-species specific binding domain binding to an epitope of human and non-chimpanzee primate CD3_{ε}.

[0183] Furthermore, the invention provides for a composition comprising a bispecific single chain antibody molecule of the invention or a bispecific single chain antibody as produced by the process disclosed above. Preferably, said composition is a pharmaceutical composition.

[0184] The invention provides also for a bispecific single chain antibody molecule as defined herein, or produced according to the process as defined herein, wherein said bispecific single chain antibody molecule is for use in the prevention, treatment or amelioration of cancer. Preferably, said cancer is a solid tumor, more preferably a carcinoma or prostate cancer. It is preferred that the bispecific single chain is further comprising suitable formulations of carriers, stabilizers and/or excipients. Moreover, it is preferred that said bispecific single chain antibody molecule is suitable to be administered in combination with an additional drug. Said drug may be a non-proteinaceous compound or a proteinaceous compound and may be administered simultaneously or non-simultaneously with the bispecific single chain antibody molecule as defined herein.

[0185] In accordance with the invention, the term “pharmaceutical composition” relates to a composition for administration to a patient, preferably a human patient. The particular preferred pharmaceutical composition of this invention comprises bispecific single chain antibodies directed against and generated against context-independent CD3 epitopes. Preferably, the pharmaceutical composition comprises suitable formulations of carriers, stabilizers and/or excipients. In a preferred embodiment, the pharmaceutical composition comprises a composition for parenteral, transdermal, intraluminal, intraarterial, intrathecal and/or intranasal administration or by direct injection into tissue. It is in particular envisaged that said composition is administered to a patient via infusion or injection. Administration of the suitable compositions may be effected by different ways, e.g., by intravenous, intraperitoneal, subcutaneous, intramuscular, topical or intradermal administration. In particular, the present invention provides for an uninterrupted administration of the suitable composition. As a non-limiting example, uninterrupted, i.e. continuous administration may be realized by a small pump system worn by the patient for metering the influx of therapeutic agent into the body of the patient. The pharmaceutical composition comprising the bispecific single chain antibodies directed against and generated against context-independent CD3 epitopes of the invention can be administered by using said pump systems. Such pump systems are generally known in the art, and commonly rely on periodic exchange of cartridges containing the therapeutic agent to be infused. When exchanging the cartridge in such a pump system, a temporary interruption of the otherwise uninterrupted flow of therapeutic agent into the body of the patient may ensue. In such a case, the phase of administration prior to cartridge replacement and the phase of administration following cartridge replacement would still be considered within the meaning of the pharmaceutical means and methods of the invention together make up one “uninterrupted administration” of such therapeutic agent.

[0186] The continuous or uninterrupted administration of these bispecific single chain antibodies directed against and generated against context-independent CD3 epitopes of this invention may be intravenuous or subcutaneous by way of a fluid delivery device or small pump system including a fluid driving mechanism for driving fluid out of a reservoir and an actuating mechanism for actuating the driving mechanism. Pump systems for subcutaneous administration may include a needle or a cannula for penetrating the skin of a patient and delivering the suitable composition into the patient's body. Said pump systems may be directly fixed or attached to the skin of the patient independently of a vein, artery or blood vessel, thereby allowing a direct contact between the pump system and the skin of the patient. The pump system can be attached to the skin of the patient for 24 hours up to several days. The pump system may be of small size with a reservoir for small volumes. As a non-limiting example, the volume of the reservoir for the suitable pharmaceutical composition to be administered can be between 0.1 and 50 ml.

[0187] The continuous administration may be transdermal by way of a patch worn on the skin and replaced at intervals. One of skill in the art is aware of patch systems for drug delivery suitable for this purpose. It is of note that transdermal administration is especially amenable to uninterrupted administration, as exchange of a first exhausted patch can advantageously be accomplished simultaneously with the placement of a new, second patch, for example on the surface of the skin immediately adjacent to the first exhausted patch and immediately prior to removal of the first exhausted patch. Issues of flow interruption or power cell failure do not arise.

[0188] The composition of the present invention, comprising in particular bispecific single chain antibodies directed against and generated against context-independent CD3 epitopes may further comprise a pharmaceutically acceptable carrier. Examples of suitable pharmaceutical carriers are well known in the art and include solutions, e.g. phosphate buffered saline solutions, water, emulsions, such as oil/water emulsions, various types of wetting agents, sterile solutions, liposomes, etc. Compositions comprising such carriers can be formulated by well known conventional methods. Formulations can comprise carbohydrates, buffer solutions, amino acids and/or surfactants. Carbohydrates may be non-reducing sugars, preferably trehalose, sucrose, octasulfate, sorbitol or xylitol. Such formulations may be used for continuous administrations which may be intravenuous or subcutaneous with and/or without pump systems. Amino acids may be charged amino acids, preferably lysine, lysine acetate, arginine, glutamate and/or histidine. Surfactants may be detergents, preferably with a molecular weight of >1.2 KD and/or a polyether, preferably with a molecular weight of >3 KD. Non-limiting examples for preferred detergents are Tween 20, Tween 40, Tween 60, Tween 80 or Tween 85. Non-limiting examples for preferred polyethers are PEG 3000, PEG 3350, PEG 4000 or PEG 5000. Buffer systems used in the present invention can have a preferred pH of 5-9 and may comprise citrate, succinate, phosphate, histidine and acetate. The compositions of the present invention can be administered to the subject at a suitable dose which can be determined e.g. by dose escalating studies by administration of increasing doses of the bispecific single chain antibody molecule of the invention exhibiting cross-species specificity described herein to non-chimpanzee primates, for instance macaques. As set forth above, the bispecific single chain antibody molecule of the invention exhibiting cross-species specificity described herein can be advantageously used in identical form in preclinical testing in non-chimpanzee primates and as drug in humans. These compositions can also be administered in combination with other proteinaceous and non-proteinaceous drugs. These drugs may be administered simultaneously with the composition comprising the bispecific single chain antibody molecule of the invention as defined herein or separately before or after administration of said polypeptide in timely defined intervals and doses. The dosage regimen will be determined by the attending physician and clinical factors. As is well known in the medical arts, dosages for any one patient depend upon many factors, including the patient's size, body surface area, age, the particular compound to be administered, sex, time and route of administration, general health, and other drugs being administered concurrently. Preparations for parenteral administration include sterile aqueous or non-aqueous solutions, suspensions, and emulsions. Examples of non-aqueous solvents are propylene glycol, polyethylene glycol, vegetable oils such as olive oil, and injectable organic esters such as ethyl oleate. Aqueous carriers include water, alcoholic/aqueous solutions, emulsions or suspensions, including saline and buffered media. Parenteral vehicles include sodium chloride solution, Ringer's dextrose, dextrose and sodium chloride, lactated Ringer's, or fixed oils. Intravenous vehicles include fluid and nutrient replenishers, electrolyte replenishers (such as those based on Ringer's dextrose), and the like. Preservatives and other additives may also be present such as, for example, antimicrobials, anti-oxidants, chelating agents, inert gases and the like. In addition, the composition of the present invention might comprise proteinaceous carriers, like, e.g., serum albumin or immunoglobulin, preferably of human origin. It is envisaged that the composition of the invention might comprise, in addition to the bispecific single chain antibody molecule of the invention defined herein, further biologically active agents, depending on the intended use of the composition. Such agents might be drugs acting on the gastro-intestinal system, drugs acting as cytostatica, drugs preventing hyperurikemia, drugs inhibiting immunoreactions (e.g. corticosteroids), drugs modulating the inflammatory response, drugs acting on the circulatory system and/or agents such as cytokines known in the art.

[0189] The biological activity of the pharmaceutical composition defined herein can be determined for instance by cytotoxicity assays, as described in the following examples, in WO 99/54440 or by Schlereth et al. (Cancer Immunol. Immunother. 20 (2005), 1-12). “Efficacy” or “in vivo efficacy” as used herein refers to the response to therapy by the pharmaceutical composition of the invention, using e.g. standardized NCl response criteria. The success or in vivo efficacy of the therapy using a pharmaceutical composition of the invention refers to the effectiveness of the composition for its intended purpose, i.e. the ability of the composition to cause its desired effect, i.e. depletion of pathologic cells, e.g. tumor cells. The in vivo efficacy may be monitored by established standard methods for the respective disease entities including, but not limited to white blood cell counts, differentials, Fluorescence Activated Cell Sorting, bone marrow aspiration. In addition, various disease specific clinical chemistry parameters and other established standard methods may be used. Furthermore, computer-aided tomography, X-ray, nuclear magnetic resonance tomography (e.g. for National Cancer Institute-criteria based response assessment [Cheson B D, Horning S J, Coiffier B, Shipp M A, Fisher R I, Connors J M, Lister T A, Vose J, Grillo-Lopez A, Hagenbeek A, Cabanillas F, Klippensten D, Hiddemann W, Castellino R, Harris N L, Armitage J O, Carter W, Hoppe R, Canellos G P. Report of an international workshop to standardize response criteria for non-Hodgkin's lymphomas. NCl Sponsored International Working Group. J Clin Oncol. 1999 April; 17(4):1244]), positron-emission tomography scanning, white blood cell counts, differentials, Fluorescence Activated Cell Sorting, bone marrow aspiration, lymph node biopsies/histologies, and various cancer specific clinical chemistry parameters (e.g. lactate dehydrogenase) and other established standard methods may be used.

[0190] Another major challenge in the development of drugs such as the pharmaceutical composition of the invention is the predictable modulation of pharmacokinetic properties. To this end, a pharmacokinetic profile of the drug candidate, i.e. a profile of the pharmacokinetic parameters that effect the ability of a particular drug to treat a given condition, is established. Pharmacokinetic parameters of the drug influencing the ability of a drug for treating a certain disease entity include, but are not limited to: half-life, volume of distribution, hepatic first-pass metabolism and the degree of blood serum binding. The efficacy of a given drug agent can be influenced by each of the parameters mentioned above.

[0191] “Half-life” means the time where 50% of an administered drug are eliminated through biological processes, e.g. metabolism, excretion, etc.

[0192] By “hepatic first-pass metabolism” is meant the propensity of a drug to be metabolized upon first contact with the liver, i.e. during its first pass through the liver.

[0193] “Volume of distribution” means the degree of retention of a drug throughout the various compartments of the body, like e.g. intracellular and extracellular spaces, tissues and organs, etc. and the distribution of the drug within these compartments. “Degree of blood serum binding” means the propensity of a drug to interact with and bind to blood serum proteins, such as albumin, leading to a reduction or loss of biological activity of the drug.

[0194] Pharmacokinetic parameters also include bioavailability, lag time (Tlag), Tmax, absorption rates, more onset and/or Cmax for a given amount of drug administered.

[0195] “Bioavailability” means the amount of a drug in the blood compartment.

[0196] “Lag time” means the time delay between the administration of the drug and its detection and measurability in blood or plasma.

[0197] “Tmax” is the time after which maximal blood concentration of the drug is reached, and “Cmax” is the blood concentration maximally obtained with a given drug. The time to reach a blood or tissue concentration of the drug which is required for its biological effect is influenced by all parameters. Pharmacokinetik parameters of bispecific single chain antibodies exhibiting cross-species specificity, which may be determined in preclinical animal testing in non-chimpanzee primates as outlined above are also set forth e.g. in the publication by Schlereth et al. (Cancer Immunol. Immunother. 20 (2005), 1-12).

[0198] The term “toxicity” as used herein refers to the toxic effects of a drug manifested in adverse events or severe adverse events. These side events might refer to a lack of tolerability of the drug in general and/or a lack of local tolerance after administration. Toxicity could also include teratogenic or carcinogenic effects caused by the drug.

[0199] The term “safety”, “in vivo safety” or “tolerability” as used herein defines the administration of a drug without inducing severe adverse events directly after administration (local tolerance) and during a longer period of application of the drug. “Safety”, “in vivo safety” or “tolerability” can be evaluated e.g. at regular intervals during the treatment and follow-up period. Measurements include clinical evaluation, e.g. organ manifestations, and screening of laboratory abnormalities. Clinical evaluation may be carried out and deviating to normal findings recorded/coded according to NCI-CTC and/or MedDRA standards. Organ manifestations may include criteria such as allergy/immunology, blood/bone marrow, cardiac arrhythmia, coagulation and the like, as set forth e.g. in the Common Terminology Criteria for adverse events v3.0 (CTCAE). Laboratory parameters which may be tested include for instance haematology, clinical chemistry, coagulation profile and urine analysis and examination of other body fluids such as serum, plasma, lymphoid or spinal fluid, liquor and the like. Safety can thus be assessed e.g. by physical examination, imaging techniques (i.e. ultrasound, x-ray, CT scans, Magnetic Resonance Imaging (MRI), other measures with technical devices (i.e. electrocardiogram), vital signs, by measuring laboratory parameters and recording adverse events. For example, adverse events in non-chimpanzee primates in the uses and methods according to the invention may be examined by histopathological and/or histochemical methods.

[0200] The term “effective and non-toxic dose” as used herein refers to a tolerable dose of the bispecific single chain antibody as defined herein which is high enough to cause depletion of pathologic cells, tumor elimination, tumor shrinkage or stabilization of disease without or essentially without major toxic effects. Such effective and non-toxic doses may be determined e.g. by dose escalation studies described in the art and should be below the dose inducing severe adverse side events (dose limiting toxicity, DLT).

[0201] The above terms are also referred to e.g. in the Preclinical safety evaluation of biotechnology-derived pharmaceuticals S6; ICH Harmonised Tripartite Guideline; ICH Steering Committee meeting on Jul. 16, 1997.

[0202] Moreover, the invention relates to a pharmaceutical composition comprising a bispecific single chain antibody molecule of this invention or produced according to the process according to the invention for the prevention, treatment or amelioration of cancer. Preferably, said cancer is a solid tumor, preferably a carcinoma or prostate cancer. Preferably, said pharmaceutical composition further comprises suitable formulations of carriers, stabilizers and/or excipients.

[0203] A further aspect of the invention relates to a use of a bispecific single chain antibody molecule/polypeptide as defined herein above or produced according to a process defined herein above, for the preparation of a pharmaceutical composition for the prevention, treatment or amelioration of a disease. Preferably, said disease is cancer. More preferably, said cancer is a solid tumor, preferably a carcinoma or prostate cancer.

[0204] In another preferred embodiment of use of the bispecific single chain antibody molecule of the invention said pharmaceutical composition is suitable to be administered in combination with an additional drug, i.e. as part of a co-therapy. In said co-therapy, an active agent may be optionally included in the same pharmaceutical composition as the bispecific single chain antibody molecule of the invention, or may be included in a separate pharmaceutical composition. In this latter case, said separate pharmaceutical composition is suitable for administration prior to, simultaneously as or following administration of said pharmaceutical composition comprising the bispecific single chain antibody molecule of the invention. The additional drug or pharmaceutical composition may be a non-proteinaceous compound or a proteinaceous compound. In the case that the additional drug is a proteinaceous compound, it is advantageous that the proteinaceous compound be capable of providing an activation signal for immune effector cells.

[0205] Preferably, said proteinaceous compound or non-proteinaceous compound may be administered simultaneously or non-simultaneously with the bispecific single chain antibody molecule of the invention, a nucleic acid molecule as defined hereinabove, a vector as defined as defined hereinabove, or a host as defined as defined hereinabove.

[0206] Another aspect of the invention relates to a method for the prevention, treatment or amelioration of a disease in a subject in the need thereof, said method comprising the step of administration of an effective amount of a pharmaceutical composition of the invention. Preferably, said disease is cancer. Preferably, said cancer is a solid tumor, preferably a carcinoma or prostate cancer.

[0207] In another preferred embodiment of the method of the invention said pharmaceutical composition is suitable to be administered in combination with an additional drug, i.e. as part of a co-therapy. In said co-therapy, an active agent may be optionally included in the same pharmaceutical composition as the bispecific single chain antibody molecule of the invention, or may be included in a separate pharmaceutical composition. In this latter case, said separate pharmaceutical composition is suitable for administration prior to, simultaneously as or following administration of said pharmaceutical composition comprising the bispecific single chain antibody molecule of the invention. The additional drug or pharmaceutical composition may be a non-proteinaceous compound or a proteinaceous compound. In the case that the additional drug is a proteinaceous compound, it is advantageous that the proteinaceous compound be capable of providing an activation signal for immune effector cells.

[0208] Preferably, said proteinaceous compound or non-proteinaceous compound may be administered simultaneously or non-simultaneously with the bispecific single chain antibody molecule of the invention, a nucleic acid molecule as defined hereinabove, a vector as defined as defined hereinabove, or a host as defined as defined hereinabove.

[0209] It is preferred for the above described method of the invention that said subject is a human.

[0210] In a further aspect, the invention relates to a kit comprising a bispecific single chain antibody molecule of the invention, a nucleic acid molecule of the invention, a vector of the invention, or a host of the invention.

[0211] These and other embodiments are disclosed and encompassed by the description and Examples of the present invention. Recombinant techniques and methods in immunology are described e.g. in Sambrook et al. Molecular Cloning: A Laboratory Manual; Cold Spring Harbor Laboratory Press, 3^{rd} edition 2001; Lefkovits; Immunology Methods Manual; The Comprehensive Sourcebook of Techniques; Academic Press, 1997; Golemis; Protein-Protein Interactions: A Molecular Cloning Manual; Cold Spring Laboratory Press, 2002. Further literature concerning any one of the antibodies, methods, uses and compounds to be employed in accordance with the present invention may be retrieved from public libraries and databases, using for example electronic devices. For example, the public database “Medline”, available on the Internet, may be utilized, for example under http://www.ncbi.nlm.nih.gov/PubMed/medline.html. Further databases and addresses such as http://www.ncbi.nlm.nih.gov/ or listed at the EMBL-services homepage under http://www.embl.de/services/index.html are known to the person skilled in the art and can also be obtained using, e.g., http://www.google.com.

[0212] The figures show:

[0213] FIG. 1

[0214] Fusion of the N-terminal amino acids 1-27 of primate CD3 epsilon to a heterologous soluble protein.

[0215] FIG. 2

[0216] The figure shows the average absorption values of quadruplicate samples measured in an ELISA assay detecting the presence of a construct consisting of the N-terminal amino acids 1-27 of the mature human CD3 epsilon chain fused to the hinge and Fc gamma portion of human IgG1 and a C-terminal 6 Histidine tag in a supernatant of transiently transfected 293 cells. The first column labeled “27 aa huCD3E” shows the average absorption value for the construct, the second column labeled “irrel. SN” shows the average value for a supernatant of 293 cells transfected with an irrelevant construct as negative control. The comparison of the values obtained for the construct with the values obtained for the negative control clearly demonstrates the presence of the recombinant construct.

[0217] FIG. 3

[0218] The figure shows the average absorption values of quadruplicate samples measured in an ELISA assay detecting the binding of the cross species specific anti-CD3 binding molecules in form of crude preparations of periplasmatically expressed single-chain antibodies to a construct comprising the N-terminal 1-27 amino acids of the mature human CD3 epsilon chain fused to the hinge and Fc gamma portion of human IgG1 and a C-terminal His6 tag. The columns show from left to right the average absorption values for the specificities designated as A2J HLP, I2C HLP E2M HLP, F70 HLP, G4H HLP, H2C HLP, E1L HLP, F12Q HLP, F6A HLP and H1E HLP. The rightmost column labelled “neg. contr.” shows the average absorption value for the single-chain preparation of a murine anti-human CD3 antibody as negative control. The comparison of the values obtained for the anti-CD3 specificities with the values obtained for the negative control clearly demonstrates the strong binding of the anti-CD3 specificities to the N-terminal 1-27 amino acids of the mature human CD3 epsilon chain.

[0219] FIG. 4

[0220] Fusion of the N-terminal amino acids 1-27 of primate CD3 epsilon to a heterologous membrane bound protein.

[0221] FIG. 5

[0222] Histogram overlays of different transfectants tested in a FACS assay detecting the presence of recombinant transmembrane fusion proteins consisting of cynomolgus EpCAM and the N-terminal 1-27 amino acids of the human, marmoset, tamarin, squirrel monkey and domestic swine CD3 epsilon chain respectively. The histogram overlays from left to right and top to bottom show the results for the transfectants expressing the constructs comprising the human 27 mer, marmoset 27 mer, tamarin 27 mer, squirrel monkey 27 mer and swine 27 mer respectively. In the individual overlays the thin line represents a sample incubated with PBS with 2% FCS instead of anti-Flag M2 antibody as negative control and the bold line shows a sample incubated with the anti-Flag M2 antibody. For each construct the overlay of the histograms shows binding of the anti-Flag M2 antibody to the transfectants, which clearly demonstrates the expression of the recombinant constructs on the transfectants.

[0223] FIG. 6

[0224] Histogram overlays of different transfectants tested in a FACS assay detecting the binding of the cross-species specific anti-CD3 binding molecules in form of crude preparations of periplasmatically expressed single-chain antibodies to the N-terminal amino acids 1-27 of the human, marmoset, tamarin and squirrel monkey CD3 epsilon chain respectively fused to cynomolgus EpCAM.

[0225] FIG. 6A:

[0226] The histogram overlays from left to right and top to bottom show the results for the transfectants expressing the 1-27 CD3-EpCAM comprising the human 27 mer tested with the CD3 specific binding molecules designated H2C HLP, F12Q HLP, E2M HLP and G4H HLP respectively.

[0227] FIG. 6B:

[0228] The histogram overlays from left to right and top to bottom show the results for the transfectants expressing the 1-27 CD3-EpCAM comprising the marmoset 27 mer tested with the CD3 specific binding molecules designated H2C HLP, F12Q HLP, E2M HLP and G4H HLP respectively.

[0229] FIG. 6C:

[0230] The histogram overlays from left to right and top to bottom show the results for the transfectants expressing the 1-27 CD3-EpCAM comprising the tamarin 27 mer tested with the CD3 specific binding molecules designated H2C HLP, F12Q HLP, E2M HLP and G4H HLP respectively.

[0231] FIG. 6D:

[0232] The histogram overlays from left to right and top to bottom show the results for the transfectants expressing the 1-27 CD3-EpCAM comprising the squirrel monkey 27 mer tested with the CD3 specific binding molecules designated H2C HLP, F12Q HLP, E2M HLP and G4H HLP respectively.

[0233] FIG. 6E:

[0234] The histogram overlays from left to right and top to bottom show the results for the transfectants expressing the 1-27 CD3-EpCAM comprising the swine 27 mer tested with the CD3 specific binding molecules designated H2C HLP, F12Q HLP, E2M HLP and G4H HLP respectively.

[0235] In the individual overlays the thin line represents a sample incubated with a single-chain preparation of a murine anti-human CD3-antibody as negative control and the bold line shows a sample incubated with the respective anti-CD3 binding molecules indicated. Considering the lack of binding to the swine 27 mer transfectants and the expression levels of the constructs shown in FIG. 5 the overlays of the histograms show specific and strong binding of the tested anti-CD3 specificities of the fully cross-species specific human bispecific single chain antibodies to cells expressing the recombinant transmembrane fusion proteins comprising the N-terminal amino acids 1-27 of the human, marmoset, tamarin and squirrel monkey CD3 epsilon chain respectively fused to cynomolgus EpCAM and show therefore multi primate cross-species specificity of the anti-CD3 binding molecules.

[0236] FIG. 7

[0237] FACS assay for detection of human CD3 epsilon on transfected murine EL4 T cells. Graphical analysis shows an overlay of histograms. The bold line shows transfected cells incubated with the anti-human CD3 antibody UCHT-1. The thin line represents cells incubated with a mouse IgG1 isotype control. Binding of the anti CD3 antibody UCHT1 clearly shows expression of the human CD3 epsilon chain on the cell surface of transfected murine EL4 T cells.

[0238] FIG. 8

[0239] Binding of cross-species specific anti CD3 antibodies to alanine-mutants in an alanine scanning experiment. In the individual Figures the columns show from left to right the calculated binding values in arbitrary units in logarithmic scale for the wild-type transfectant (WT) and for all alanine-mutants from the position 1 to 27. The binding values are calculated using the following formula:

$$value\_Sample ( x , y ) = \frac{Sample ( x , y ) - neg\_Contr . ( x )}{\begin{matrix}( UCHT - 1 ( x ) - neg\_Contr . ( x ) ) * \\ \frac{WT ( y ) - neg\_Contr . ( wt )}{UCHT - 1 ( wt ) - neg\_Contr . ( wt )}\end{matrix}}$$

[0240] In this equation value_Sample means the value in arbitrary units of binding depicting the degree of binding of a specific anti-CD3 antibody to a specific alanine-mutant as shown in the Figure, Sample means the geometric mean fluorescence value obtained for a specific anti-CD3 antibody assayed on a specific alanine-scanning transfectant, neg_Contr. means the geometric mean fluorescence value obtained for the negative control assayed on a specific alanine-mutant, UCHT-1 means the geometric mean fluorescence value obtained for the UCHT-1 antibody assayed on a specific alanine-mutant, WT means the geometric mean fluorescence value obtained for a specific anti-CD3 antibody assayed on the wild-type transfectant, x specifies the respective transfectant, y specifies the respective anti-CD3 antibody and wt specifies that the respective transfectant is the wild-type. Individual alanine-mutant positions are labelled with the single letter code of the wild-type amino acid and the number of the position.

[0241] FIG. 8A:

[0242] The figure shows the results for cross-species specific anti CD3 antibody A2J HLP expressed as chimeric IgG molecule. Reduced binding activity is observed for mutations to alanine at position 4 (asparagine), at position 23 (threonine) and at position 25 (isoleucine). Complete loss of binding is observed for mutations to alanine at position 1 (glutamine), at position 2 (aspartate), at position 3 (glycine) and at position 5 (glutamate).

[0243] FIG. 8B:

[0244] The figure shows the results for cross-species specific anti CD3 antibody E2M HLP, expressed as chimeric IgG molecule. Reduced binding activity is observed for mutations to alanine at position 4 (asparagine), at position 23 (threonine) and at position 25 (isoleucine). Complete loss of binding is observed for mutations to alanine at position 1 (glutamine), at position 2 (aspartate), at position 3 (glycine) and at position 5 (glutamate).

[0245] FIG. 8C:

[0246] The figure shows the results for cross-species specific anti CD3 antibody H2C HLP, expressed as chimeric IgG molecule. Reduced binding activity is observed for mutations to alanine at position 4 (asparagine). Complete loss of binding is observed for mutations to alanine glutamine at position 1 (glutamine), at position 2 (aspartate), at position 3 (glycine) and at position 5 (glutamate).

[0247] FIG. 8D:

[0248] shows the results for cross-species specific anti CD3 antibody F12Q HLP, tested as periplasmatically expressed single-chain antibody. Complete loss of binding is observed for mutations to alanine at position 1 (glutamine), at position 2 (aspartate), at position 3 (glycine) and at position 5 (glutamate).

[0249] FIG. 9

[0250] FACS assay detecting the binding of the cross-species specific anti-CD3 binding molecule H2C HLP to human CD3 with and without N-terminal His6 tag. Histogram overlays are performed of the EL4 cell line transfected with wild-type human CD3 epsilon chain (left histogram) or the human CD3 epsilon chain with N-terminal His 6 tag (right histogram) tested in a FACS assay detecting the binding of cross-species specific binding molecule H2C HLP. Samples are incubated with an appropriate isotype control as negative control (thin line), anti-human CD3 antibody UCHT-1 as positive control (dotted line) and cross-species specific anti-CD3 antibody H2C HLP in form of a chimeric IgG molecule (bold line).

[0251] Histogram overlays show comparable binding of the UCHT-1 antibody to both transfectants as compared to the isotype control demonstrating expression of both recombinant constructs. Histogram overlays also show binding of the anti-CD3 binding molecule H2C HLP only to the wild-type human CD3 epsilon chain but not to the His6-human CD3 epsilon chain. These results demonstrate that a free N-terminus is essential for binding of the cross-species specific anti-CD3 binding molecule H2C HLP.

[0252] FIG. 10

[0253] FACS binding analysis of designated cross-species specific bispecific single chain constructs to CHO cells transfected with the human MCSP D3, human CD3+ T cell line HPB-ALL, CHO cells transfected with cynomolgus MCSP D3 and a macaque T cell line 4119 LnPx. The FACS staining is performed as described in Example 10. The thick line represents cells incubated with 2 μg/ml purified protein that are subsequently incubated with the anti-his antibody and the PE labeled detection antibody. The thin histogram line reflects the negative control: cells only incubated with the anti-his antibody and the detection antibody.

[0254] FIG. 11

[0255] FACS binding analysis of designated cross-species specific bispecific single chain constructs CHO cells transfected with the human MCSP D3, human CD3+ T cell line HPB-ALL, CHO cells transfected with cynomolgus MCSP D3 and a macaque T cell line 4119 LnPx. The FACS staining is performed as described in Example 10. The thick line represents cells incubated with 2 μg/ml purified protein that are subsequently incubated with the anti-his antibody and the PE labeled detection antibody. The thin histogram line reflects the negative control: cells only incubated with the anti-his antibody and the detection antibody.

[0256] FIG. 12

[0257] FACS binding analysis of designated cross-species specific bispecific single chain constructs CHO cells transfected with the human MCSP D3, human CD3+ T cell line HPB-ALL, CHO cells transfected with cynomolgus MCSP D3 and a macaque T cell line 4119 LnPx. The FACS staining is performed as described in Example 10. The thick line represents cells incubated with 2 μg/ml purified monomeric protein that are subsequently incubated with the anti-his antibody and the PE labeled detection antibody. The thin histogram line reflects the negative control: cells only incubated with the anti-his antibody and the detection antibody.

[0258] FIG. 13

[0259] Cytotoxicity activity induced by designated cross-species specific MCSP specific single chain constructs redirected to indicated target cell lines. A) Stimulated CD4−/CD56− human PBMCs are used as effector cells, CHO cells transfected with human MCSP D3 as target cells. B) The macaque T cell line 4119 LnPx are used as effector cells, CHO cells transfected with cynomolgus MCSP D3 as target cells. The assay is performed as described in Example 11.

[0260] FIG. 14

[0261] Cytotoxicity activity induced by designated cross-species specific MCSP specific single chain constructs redirected to indicated target cell lines. A) and B) The macaque T cell line 4119 LnPx are used as effector cells, CHO cells transfected with cynomolgus MCSP D3 as target cells. The assay is performed as described in Example 11.

[0262] FIG. 15

[0263] Cytotoxicity activity induced by designated cross-species specific MCSP specific single chain constructs redirected to indicated target cell lines. A) and B) Stimulated CD4−/CD56− human PBMCs are used as effector cells, CHO cells transfected with human MCSP D3 as target cells. The assay is performed as described in Example 11.

[0264] FIG. 16

[0265] Cytotoxicity activity induced by designated cross-species specific MCSP specific single chain constructs redirected to indicated target cell lines. A) Stimulated CD4−/CD56− human PBMCs are used as effector cells, CHO cells transfected with human MCSP D3 as target cells. B) The macaque T cell line 4119 LnPx are used as effector cells, CHO cells transfected with cynomolgus MCSP D3 as target cells. The assay is performed as described in Example 11.

[0266] FIG. 17

[0267] Cytotoxicity activity induced by designated cross-species specific MCSP specific single chain constructs redirected to indicated target cell lines. A) Stimulated CD4−/CD56− human PBMCs are used as effector cells, CHO cells transfected with human MCSP D3 as target cells. B) The macaque T cell line 4119 LnPx are used as effector cells, CHO cells transfected with cynomolgus MCSP D3 as target cells. The assay is performed as described in Example 11.

[0268] FIG. 18

[0269] Plasma stability of MCSP and CD3 cross-species specific bispecific single chain antibodies tested by the measurement of cytotoxicity activity induced by samples of the designated single chain constructs incubated with 50% human plasma at 37° C. and 4° C. for 24 hours respectively or with addition of 50% human plasma immediately prior to cytotoxicity testing or without addition of plasma. CHO cells transfected with human MCSP are used as target cell line and stimulated CD4−/CD56− human PBMCs are used as effector cells. The assay is performed as described in Example 12.

[0270] FIG. 19

[0271] Initial drop and recovery (i.e. redistribution) of absolute T cell counts (open squares), in peripheral blood of B-NHL patients (patent numbers 1, 7, 23, 30, 31, and 33 of Table 4), who had essentially no circulating CD19-positive target B cells (filled triangles), during the starting phase of intravenous infusion with the CD3 binding molecule CD19×CD3 recognizing a conventional context dependent CD3 epitope. Absolute cell counts are given in 1000 cells per microliter blood. The first data point shows baseline counts immediately prior to the start of infusion. The CD19×CD3 dose is given in parentheses beside the patient number.

[0272] FIG. 20

[0273] (A) Repeated T cell redistribution (open squares) in B-NHL patient #19 (Table 4) who had no circulating CD19-positive target B cells (filled triangles) and developed CNS symptoms under continuous intravenous infusion with CD19×CD3 at a starting dose of 5 μg/m²/24 h for one day followed by a sudden dose increase to 15 μg/m²/24 h. Absolute cell counts are given in 1000 cells per microliter blood. The first data point shows baseline counts immediately prior to the start of infusion. After recovery of circulating T cells from the first episode of redistribution triggered by the treatment start at 5 μg/m²/24 h the stepwise dose increase from 5 to 15 μg/m²/24 h triggered a second episode of T cell redistribution that was associated with the development of CNS symptoms dominated by confusion and disorientation.

[0274] (B) Repeated T cell redistribution in a B-NHL patient, who developed CNS symptoms under repeated intravenous bolus infusion with CD19×CD3 at 1.5 μg/m². Absolute cell counts are given in 1000 cells per microliter blood. The infusion time for each bolus administration was 2 to 4 hours. Vertical arrows indicate the start of bolus infusions. Data points at the beginning of each bolus administration show the T cell counts immediately prior to start of bolus infusion. Each bolus infusion triggered an episode of T cell redistribution followed by recovery of the T cell counts prior to the next bolus infusion. Finally the third episode of T cell redistribution was associated with the development of CNS symptoms in this patient.

[0275] FIG. 21

[0276] Complex T cell redistribution pattern (open squares) in B-NHL patient #20 (Table 4) without circulating CD19-positive target B cells (filled triangles), during ramp initiation of the CD19×CD3 infusion i.e. even gradual increase of flow-rate from almost zero to 15 μg/m²/24 h during the first 24 hours of treatment. Absolute cell counts are given in 1000 cells per microliter blood. The first data point shows baseline counts immediately prior to the start of infusion. The CD19×CD3 dose is given in parentheses beside the patient number. T cells reappearing in the circulating blood after the initial redistribution triggered by the first exposure to CD19×CD3 are partially induced to redisappear from circulating blood again by still increasing levels of CD19×CD3 during the ramp phase.

[0277] FIG. 22

[0278] T and B cell counts during treatment with CD19×CD3 of B-NHL patient #13 (Table 4) who had a significant number of circulating CD19-positive target B (lymphoma) cells (filled triangles). Absolute cell counts are given in 1000 cells per microliter blood. The first data point shows baseline counts immediately prior to the start of infusion. The CD19×CD3 dose is given in parentheses beside the patient number. T cells (open squares) disappear completely from the circulation upon start of CD19×CD3 infusion and do not reappear until the circulating CD19-positive B (lymphoma) cells (filled triangles) are depleted from the peripheral blood.

[0279] FIG. 23

[0280] Repeated T cell redistribution (open squares) in B-NHL patient #24 (Table 4), who had essentially no circulating CD19-positive target B cells (filled triangles) and developed CNS symptoms upon initiation of CD19×CD3 infusion without additional HSA as required for stabilisation of the drug (upper panel). After first recovery of circulating T cells from initial redistribution the uneven drug flow due to the lack of stabilizing HSA triggered a second episode of T cell redistribution that was associated with the development of CNS symptoms dominated by confusion and disorientation. When the same patient was restarted correctly with CD19×CD3 solution containing additional HSA for drug stabilisation, no repeated T cell redistribution was observed (lower panel) and the patient did not again develop any CNS symptoms. Absolute cell counts are given in 1000 cells per microliter blood. The first data point shows baseline counts immediately prior to the start of infusion. The CD19×CD3 dose is given in parentheses beside the patient number.

[0281] FIG. 24

[0282] Model of T cell adhesion to endothelial cells induced by monovalent binding to context dependent CD3 epitopes. Monovalent interaction of a conventional CD3 binding molecule to its context dependent epitope on CD3 epsilon can lead to an allosteric change in the conformation of CD3 followed by the recruitment of Nck2 to the cytoplasmic domain of CD3 epsilon (Gil et al. (2002) Cell 109: 901). As Nck2 is directly linked to integrins via PINCH and ILK (Legate et al. (2006) Nat Rev Mol Cell Biol 7: 20), recruitment of Nck2 to the cytoplasmic domain of CD3 epsilon following an allosteric change in the conformation of CD3 through binding of a conventional CD3 binding molecule (like the CD19×CD3 of example 13) to its context dependent epitope on CD3 epsilon, can increase the adhesiveness of T cells to endothelial cells by transiently switching integrins on the T cell surface into their more adhesive isoform via inside-out-signalling.

[0283] FIG. 25

[0284] Cytotoxic activity of CD33-AF5 VH-VL×I2C VH-VL test material used for the in vivo study in cynomolgus monkeys as described in Example 14. Specific lysis of CD33-positive target cells was determined in a standard ⁵¹Chromium release assay at increasing concentrations of CD33-AF5 VH-VL×I2C VH-VL. Assay duration was 18 hours. The macaque T cell line 4119 LnPx was used as source of effector cells. CHO cells transfected with cynomolgus CD33 served as target cells. Effector- to target cell ratio (E:T-ratio) was 10:1. The concentration of CD33-AF5 VH-VL×I2C VH-VL required for half-maximal target cell lysis (EC50) was calculated from the dose response curve with a value of 2.7 ng/ml.

[0285] FIG. 26

[0286] (A) Dose- and time-dependent depletion of CD33-positive monocytes from the peripheral blood of cynomolgus monkeys through intravenous continuous infusion of CD33-AF5 VH-VL×I2C VH-VL as described in Example 14. The percentage relative to baseline (i.e. 100%) of absolute circulating CD33-positive monocyte counts after the duration of treatment as indicated above the columns is shown for each of two cynomolgus monkeys per dose level. The dose level (i.e. infusion flow-rate) is indicated below the columns. No depletion of circulating CD33-positive monocytes was observed in animals 1 and 2 treated for 7 days at a dose of 30 μg/m²/24 h. In animals 3 and 4 treated for 7 days at a dose of 60 μg/m²/24 h circulating CD33-positive monocyte counts were reduced to 68% and 40% of baseline, respectively. At 240 μg/m²/24 h circulating CD33-positive monocytes were almost completely depleted from the peripheral blood after 3 days of treatment (animals 5 and 6). At 1000 μg/m²/24 h depletion of circulating CD33-positive monocytes from the peripheral blood was completed already after 1 day of treatment (animals 7 and 8).

[0287] (B) Course of T cell and CD33-monocyte counts in peripheral blood of two cynomolgus monkeys during continuous infusion of CD33-AF5 VH-VL×I2C VH-VL for 14 days at I2C μg/m²/24 h. Absolute cell counts are given in 1000 cells per microliter blood. The first data point shows baseline counts immediately prior to the start of infusion. After initial mobilisation of CD33-monocytes during the first 12 hours upon start of infusion CD33-monocytes in peripheral blood (filled triangles) are depleted by two thirds (animal 10) and 50% (animal 9) relative to the respective baseline counts during the further course of infusion. Circulating T cell counts (open squares) show a limited initial drop followed by recovery still during the presence of circulating CD33-positive monocytic target cells.

[0288] FIG. 27

[0289] Cytotoxic activity of MCSP-G4 VH-VL×I2C VH-VL test material used for the in vivo study in cynomolgus monkeys as described in Example 15. Specific lysis of MCSP-positive target cells was determined in a standard ⁵¹Chromium release assay at increasing concentrations of MCSP-G4 VH-VL×I2C VH-VL. Assay duration was 18 hours. The macaque T cell line 4119 LnPx was used as source of effector cells. CHO cells transfected with cynomolgus MCSP served as target cells. Effector- to target cell ratio (E:T-ratio) was 10:1. The concentration of MCSP-G4 VH-VL×I2C VH-VL required for half-maximal target cell lysis (EC50) was calculated from the dose response curve with a value of 1.9 ng/ml.

[0290] FIG. 28

[0291] Absence of initial episodes of drop and subsequent recovery of absolute T cell counts (i.e. redistribution) in peripheral blood of cynomolgus monkeys during the starting phase of intravenous infusion with the CD3 binding molecule MCSP-G4 VH-VL×I2C VH-VL recognizing an essentially context independent CD3 epitope. Absolute cell counts are given in 1000 cells per microliter blood. The first data point shows baseline counts immediately prior to the start of infusion. The MCSP-G4 VH-VL×I2C VH-VL dose is given in parentheses beside the animal number. In the known absence of MCSP-positive target cells from the circulating blood of cynomolgus monkeys there is no induction of T cell redistribution (i.e. an initial episode of drop and subsequent recovery of absolute T cell counts) through target cell mediated crosslinking of CD3. Moreover, induction of T cell redistribution (i.e. an initial episode of drop and subsequent recovery of absolute T cell counts) through a signal, which the T cells may receive through exclusive interaction with a CD3 binding site only, can be avoided by the use of CD3 binding molecules like MCSP-G4 VH-VL×I2C VH-VL recognizing an essentially context independent CD3 epitope.

[0292] FIG. 29

[0293] FACS binding analysis of designated cross-species specific bispecific constructs to CHO cells transfected with human CD33, the human CD3+ T cell line HPB-ALL, CHO cells transfected with macaque CD33 and macaque PBMC respectively. The FACS staining is performed as described in Example 16.4. The bold lines represent cells incubated with 5 μg/ml purified bispecific single chain construct or cell culture supernatant of transfected cells expressing the cross-species specific bispecific antibody constructs. The filled histograms reflect the negative controls. Supernatant of untransfected CHO cells was used as negative control. For each cross-species specific bispecific single chain construct the overlay of the histograms shows specific binding of the construct to human and macaque CD33 and human and macaque CD3.

[0294] FIG. 30

[0295] The diagrams show results of chromium release assays measuring cytotoxic activity induced by designated cross-species specific CD33 specific single chain constructs redirected to the indicated target cell lines. Effector cells were also used as indicated. The assays are performed as described in Example 16.5. The diagrams clearly demonstrate for each construct the potent recruitment of cytotoxic activity of human and macaque effector cells against human and macaque CD33 transfected CHO cells, respectively.

[0296] FIG. 31

[0297] SDS PAGE gel and Western blot monitoring the purification of the cross-species specific bispecific single chain molecule designated E292F3 HL×I2C HL. Samples from the eluate, the cell culture supernatant (SN) and the flow through of the column (FT) were analyzed as indicated. A protein marker (M) was applied as size reference. A strong protein band with a molecular weight between 50 and 60 kDa in the SDS PAGE gel demonstrates the efficient purification of the cross-species specific bispecific single chain molecule to a very high degree of purity with the one-step purification method described in Example 17.2. The Western blot detecting the histidine₆ tag confirms the identity of the protein band in the eluate as the cross-species specific bispecific single chain molecule. The faint signal for the flow through sample in this sensitive detection method further shows the nearly complete capture of bispecific single chain molecules by the purification method.

[0298] FIG. 32

[0299] SDS PAGE gel and Western blot monitoring the purification of the cross-species specific bispecific single chain molecule designated V207C12 HL×H2C HL. Samples from the eluate, the cell culture supernatant (SN) and the flow through of the column (FT) were analyzed as indicated. A protein marker (M) was applied as size reference. A strong protein band with a molecular weight between 50 and 60 kDa in the SDS PAGE gel demonstrates the efficient purification of the cross-species specific bispecific single chain molecule to a very high degree of purity with the one-step purification method described in Example 17.2. The Western blot detecting the histidine₆ tag confirms the identity of the protein band in the eluate as the cross-species specific bispecific single chain molecule. The faint signal for the flow through sample in this sensitive detection method further shows the nearly complete capture of bispecific single chain molecules by the purification method.

[0300] FIG. 33

[0301] SDS PAGE gel and Western blot monitoring the purification of the cross-species specific bispecific single chain molecule designated AF5HL×F12QHL. Samples from the eluate, the cell culture supernatant (SN) and the flow through of the column (FT) were analyzed as indicated. A protein marker (M) was applied as size reference. A strong protein band with a molecular weight between 50 and 60 kDa in the SDS PAGE gel demonstrates the efficient purification of the cross-species specific bispecific single chain molecule to a very high degree of purity with the one-step purification method described in Example 17.2. The Western blot detecting the histidine₆ tag confirms the identity of the protein band in the eluate as the cross-species specific bispecific single chain molecule. The signal in the flow through sample in this sensitive detection method is explained by saturation of the affinity column due to the high concentration of bispecific single chain molecules in the supernatant.

[0302] FIG. 34

[0303] Standard curve of AF5HL×I2CHL in 50% macaque monkey serum. The upper diagram shows the standard curve generated for the assay as described in Example 18.2.

[0304] The lower diagram shows results for quality control samples of AF5HL×I2CHL in 50% macaque monkey serum. The recovery rates are above 90% for the high and mid QC sample and above 80% for the low QC sample.

[0305] Thus the assay allows for detection of AF5HL×I2C HL in serum samples in the range from 10 ng/ml to 200 ng/ml (before dilution).

[0306] FIG. 35

[0307] Standard curve of MCSP-G4 HL×I2C HL in 50% macaque monkey serum. The upper diagram shows the standard curve generated for the assay as described in Example 18.2.

[0308] The lower diagram shows results for quality control samples of MCSP-G4 HL×I2C HL in 50% macaque monkey serum. The recovery rates are above 98% for the high and mid QC sample and above 85% for the low QC sample.

[0309] Thus the assay allows for detection of MCSP-G4 HL×I2C HL in serum samples in the range from 10 ng/ml to 200 ng/ml (before dilution).

[0310] FIG. 36

[0311] FACS binding analysis of an anti-Flag antibody to CHO cells transfected with the 1-27 N-terminal amino acids of CD3 epsilon of the designated species fused to cynomolgus EpCAM. The FACS staining was performed as described in Example 19.1. The bold lines represent cells incubated with the anti-Flag antibody. The filled histograms reflect the negative controls. PBS with 2% FCS was used as negative control. The histograms show strong and comparable binding of the anti-Flag antibody to all transfectants indicating strong and equal expression of the transfected constructs.

[0312] FIG. 37

[0313] FACS binding analysis of the I2C IgG1 construct to CHO cells expressing the 1-27 N-terminal amino acids of CD3 epsilon of the designated species fused to cynomolgus EpCAM. The FACS staining is performed as described in Example 19.3. The bold lines represent cells incubated with 50 μl cell culture supernatant of cells expressing the I2C IgG1 construct. The filled histograms reflect the negative control. Cells expressing the 1-27 N-terminal amino acids of CD3 epsilon of swine fused to cynomolgus EpCAM were used as negative control. In comparison with the negative control the histograms clearly demonstrate binding of the I2C IgG1 construct to 1-27 N-terminal amino acids of CD3 epsilon of human, marmoset, tamarin and squirrel mon key.

[0314] FIG. 38

[0315] FACS binding analysis of the I2C IgG1 construct as described in Example 19.2 to human CD3 with and without N-terminal His6 tag as described in Examples 6.1 and 5.1 respectively. The bold lines represent cells incubated with the anti-human CD3 antibody UCHT-1, the penta-His antibody (Qiagen) and cell culture supernatant of cells expressing the I2C IgG1 construct respectively as indicated. The filled histograms reflect cells incubated with an irrelevant murine IgG1 antibody as negative control.

[0316] The upper two histogram overlays show comparable binding of the UCHT-1 antibody to both transfectants as compared to the isotype control demonstrating expression of both recombinant constructs. The centre histogram overlays show binding of the penta his antibody to the cells expressing the His6-human CD3 epsilon chain (His6-CD3) but not to the cells expressing the wild-type CD3 epsilon chain (WT-CD3). The lower Histogram overlays show binding of the I2C IgG1 construct to the wild-type human CD3 epsilon chain but not to the His6-human CD3 epsilon chain. These results demonstrate that a free N-terminus is essential for binding of the cross-species specific anti-CD3 binding molecule I2C to the CD3 epsilon chain.

[0317] FIG. 39

[0318] FACS binding analysis of designated cross-species specific bispecific single chain constructs to CHO cells transfected with human MCSP D3, the human CD3+ T cell line HPB-ALL, CHO cells transfected with macaque MCSP D3 and the macaque T cell line 4119 LnPx respectively. The FACS staining was performed as described in Example 10. The bold lines represents cells incubated with 2 μg/ml purified bispecific single chain construct or cell supernatant containing the bispecific single chain construct respectively. The filled histograms reflect the negative controls. Supernatant of untransfected CHO cells was used as negative control for binding to the T cell lines. A single chain construct with irrelevant target specificity was used as negative control for binding to the MCSP D3 transfected CHO cells. For each cross-species specific bispecific single chain construct the overlay of the histograms shows specific binding of the construct to human and macaque MCSP D3 and human and macaque CD3.

[0319] FIG. 40

[0320] Cytotoxic activity induced by designated cross-species specific MCSP D3 specific single chain constructs redirected to the indicated target cell lines. Effector cells and effector to target ratio were also used as indicated. The assay is performed as described in Example 11. The diagrams clearly demonstrate potent cross-species specific recruitment of cytotoxic activity by each construct.

[0321] FIG. 41

[0322] FACS binding analysis of designated cross-species specific bispecific single chain constructs to CHO cells transfected with human CD33, the human CD3+ T cell line HPB-ALL, CHO cells transfected with macaque CD33 and macaque PBMC respectively. The FACS staining was performed as described in Example 21.2. The bold lines represent cells incubated with cell culture supernatant of transfected cells expressing the cross-species specific bispecific antibody constructs. The filled histograms reflect the negative controls. Supernatant of untransfected CHO cells was used as negative control. For each cross-species specific bispecific single chain construct the overlay of the histograms shows specific binding of the construct to human and macaque CD33 and human and macaque CD3.

[0323] FIG. 42

[0324] The diagrams show results of chromium release assays measuring cytotoxic activity induced by designated cross-species specific CD33 specific single chain constructs redirected to the indicated target cell lines. Effector cells were also used as indicated. The assays are performed as described in Example 21.3. The diagrams clearly demonstrate for each construct the potent recruitment of cytotoxic activity of human and macaque effector cells against human and macaque CD33 transfected CHO cells, respectively.

[0325] FIG. 43

[0326] T cell redistribution in a chimpanzee under weekly intravenous bolus infusion with PBS/5% HSA and PBS/5% HSA plus single-chain EpCAM/CD3-bispecific antibody construct at doses of 1.6, 2.0, 3.0 and 4.5 μg/kg. The infusion time for each bolus administration was 2 hours. Vertical arrows indicate the start of bolus infusions. Data points at the beginning of each bolus administration show the T cell counts immediately prior to start of bolus infusion. Each bolus infusion of the single-chain EpCAM/CD3-bispecific antibody construct, which recognizes a conventional context dependent CD3 epitope, triggered an episode of T cell redistribution followed by recovery of T cells to baseline values prior to the next bolus infusion.

[0327] FIG. 44

[0328] CD3 specific ELISA analysis of periplasmic preparations containing Flag tagged scFv protein fragments from selected clones. Periplasmic preparations of soluble scFv protein fragments were added to wells of an ELISA plate, which had been coated with soluble human CD3 epsilon (aa 1-27)-Fc fusion protein and had been additionally blocked with PBS 3% BSA. Detection was performed by a monoclonal anti Flag-Biotin-labeled antibody followed by peroxidase-conjugated Streptavidin. The ELISA was developed by an ABTS substrate solution. The OD values (y axis) were measured at 405 nm by an ELISA reader. Clone names are presented on the x axis.

[0329] FIG. 45

[0330] ELISA analysis of periplasmic preparations containing Flag tagged scFv protein fragments from selected clones. The same periplasmic preparations of soluble scFv protein fragments as in FIG. 44 were added to wells of an ELISA plate which had not been coated with human CD3 epsilon (aa 1-27)-Fc fusion protein but with huIgG1 (Sigma) and blocked with 3% BSA in PBS.

[0331] Detection was performed by a monoclonal anti Flag-Biotin-labeled antibody followed by peroxidase-conjugated Streptavidin. The ELISA was developed by an ABTS substrate solution. The OD values (y axis) were measured at 405 nm by an ELISA reader. Clone names are presented on the x axis.

[0332] FIG. 46

[0333] FACS binding analysis of the designated cross-species specific bispecific single chain constructs to CHO cells transfected with the human PSMA, human CD3+ T cell line HPB-ALL, CHO cells transfected with macaque PSMA and a macaque T cell line 4119 LnPx. The FACS staining is performed as described in Example 24.4. The thick line represents cells incubated with cell culture supernatant that are subsequently incubated with the anti-his antibody and the PE labeled detection antibody. The thin histogram line reflects the negative control: cells only incubated with the anti-his antibody and the detection antibody.

[0334] FIG. 47

[0335] Cytotoxic activity induced by the designated cross-species specific bispecific single chain constructs redirected to indicated target cell lines. A) and B) Stimulated CD4−/CD56− human PBMCs are used as effector cells, CHO cells transfected with human PSMA as target cells. The assay is performed as described in Example 24.5.

[0336] FIG. 48

[0337] Cytotoxic activity induced by the designated cross-species specific bispecific single chain constructs redirected to indicated target cell lines. A) and B) The macaque T cell line 4119 LnPx is used as effector cells, CHO cells transfected with macaque PSMA as target cells. The assay is performed as described in Example 24.5.

[0338] FIG. 49

[0339] FACS binding analysis of the designated cross-species specific bispecific single chain constructs to the human PSMA positive prostate cancer cell line LNCaP, the human CD3+ T cell line HPB-ALL and to the macaque T cell line 4119LnPx respectively. The FACS staining was performed as described in Example 24.7. The bold lines represent cells incubated with cell culture supernatant of transfected cells expressing the cross-species specific bispecific antibody constructs. The filled histograms reflect the negative controls. Cell culture medium was used as a negative control. For each cross-species specific bispecific single chain construct shown the overlay of the histograms demonstrates binding of the construct to human PSMA and human and macaque CD3.

[0340] FIG. 50

[0341] The diagrams show results of chromium release assays measuring cytotoxic activity induced by designated cross-species specific bispecific single chain constructs redirected to the indicated target cell line. Effector cells were also used as indicated. The assays were performed as described in Example 24.8. The diagrams clearly demonstrate for the shown constructs the potent recruitment of cytotoxic activity of human or macaque effector T cells against PSMA-positive cancer cells by the example of the human prostate cancer cell line LNCaP or the macaque cell line 4119LnPx.

[0342] FIG. 51

[0343] FACS binding analysis of the designated cross-species specific bispecific single chain constructs to PSMA positive cells. The FACS staining was performed as described in Example 24.7. For each cross-species specific bispecific single chain construct shown the overlay of the histograms demonstrates binding of the construct to human PSMA and human and macaque CD3.

[0344] FIG. 52

[0345] The diagrams show results of chromium release assays measuring cytotoxic activity induced by designated cross-species specific bispecific single chain constructs redirected to the indicated target cell line. Effector cells were also used as indicated. The assays were performed as described in Example 24.8. The diagrams clearly demonstrate for the shown constructs the potent recruitment of cytotoxic activity of human or macaque effector T cells against PSMA-positive cells.

[0346] FIG. 53

[0347] FACS binding analysis of designated bispecific single chain constructs to CHO cells expressing designated human/rat PSMA chimeras as described in Example 25.1. The FACS staining was performed as described in Example 25.2. The bold lines represent cells incubated with cell culture supernatant of transfected cells expressing the bispecific antibody constructs. The filled histograms show the negative controls. Supernatant of untransfected CHO cells was used as negative control. For each bispecific single chain construct the overlays of the histograms show specific binding of the construct to to the chimeric constructs huPSMArat140-169, huPSMArat191-258, huPSMArat281-284, huPSMArat683-690 and huPSMArat716-750. Compared with the signals obtained for the other bispecific single chain construct there is a clear lack of binding for the bispecific single chain antibody constructs PM84-D7×I2C, PM29-G1×I2C and PM49-B9×I2C to the chimeric construct huPSMArat300-344. Furthermore compared with the signals obtained for the other bispecific single chain constructs there is a clear lack of binding for the bispecific single chain antibody construct PM34-C7×I2C to the construct huPSMArat598-617.

[0348] FIG. 54

[0349] Binding of scFv MP9076-A9, the PSMA target binder of PSMA BiTE antibody PM 76-A9×I2C to 15-mer peptides spanning over the extracellular domain of human PSMA and overlapping with their neighboring peptides by 14 amino acids. Peptide numbers are plotted on the X-axis. ELISA signals using His detection are plotted on the Y-axis.

[0350] FIG. 55

[0351] Binding of scFv MP9076-B10, the PSMA target binder of PSMA BiTE antibody PM 76-B10×I2C to 15-mer peptides spanning over the extracellular domain of human PSMA and overlapping with their neighboring peptides by 14 amino acids. Peptide numbers are plotted on the X-axis. ELISA signals using His detection are plotted on the Y-axis.

[0352] FIG. 56

[0353] Binding of scFv F1-A10, the PSMA target binder of PSMA BiTE antibody PM F1-A10×I2C to 15-mer peptides spanning over the extracellular domain of human PSMA and overlapping with their neighboring peptides by 14 amino acids. Peptide numbers are plotted on the X-axis. ELISA signals using His detection are plotted on the Y-axis.

[0354] FIG. 57

[0355] Potential dominant epitopes of scFvs MP 9076-A9, MP 9076-B10 and F1-A10. The potential core binding amino acids in the three-dimensional structure of human PSMA are encircled by a dotted line. Color codes depict scFvs and the respective epitopes. The crystal structure of human PSMA was reported by Davis et al. in 2005 (PNAS, 102: 5981-6).

[0356] The present invention is additionally described by way of the following illustrative non-limiting examples that provide a better understanding of the present invention and of its many advantages.

### EXAMPLES

### 1. Identification of CD3Epsilon Sequences from Blood Samples of Non-Human Primates

[0357] Blood samples of the following non-human primates were used for CD3epsilon-identification: Callithrix jacchus, Saguinus oedipus and Saimiris ciureus. Fresh heparin-treated whole blood samples were prepared for isolating total cellular RNA according to manufacturer's protocol (QIAamp RNA Blood Mini Kit, Qiagen). The extracted mRNA was transcribed into cDNA according to published protocols. In brief, 10 μl of precipitated RNA was incubated with 1.2 μl of 10× hexanucleotide mix (Roche) at 70° C. for 10 minutes and stored on ice. A reaction mix consisting of 4 μl of 5× superscript II buffer, 0.2 μl of 0.1M dithiothreitole, 0.8 μl of superscript II (Invitrogen), 1.2 μl of desoxyribonucleoside triphosphates (25 μM), 0.8 μl of RNase Inhibitor (Roche) and 1.8 μl of DNase and RNase free water (Roth) was added. The reaction mix was incubated at room temperature for 10 minutes followed by incubation at 42° C. for 50 minutes and at 90° C. for 5 minutes. The reaction was cooled on ice before adding 0.8 μl of RNaseH (1 U/μl, Roche) and incubated for 20 minutes at 37° C.

[0358] The first-strand cDNAs from each species were subjected to separate 35-cycle polymerase chain reactions using Taq DNA polymerase (Sigma) and the following primer combination designed on database research: forward primer 5′-AGAGTTCTGGGCCTCTGC-3′ (SEQ ID NO: 253); reverse primer 5′-CGGATGGGCTCATAGTCTG-3′ (SEQ ID NO: 254);. The amplified 550 bp-bands were gel purified (Gel Extraction Kit, Qiagen) and sequenced (Sequiserve, Vaterstetten/Germany, see sequence listing).

CD3epsilon Callithrix jacchus
Nucleotides
CAGGACGGTAATGAAGAAATGGGTGATACTACACAGAACCCATATAAA
GTTTCCATCTCAGGAACCACAGTAACACTGACATGCCCTCGGTATGATG
GACATGAAATAAAATGGCTCGTAAATAGTCAAAACAAAGAAGGTCATGA
GGACCACCTGTTACTGGAGGACTTTTCGGAAATGGAGCAAAGTGGTTATT
ATGCCTGCCTCTCCAAAGAGACTCCCGCAGAAGAGGCGAGCCATTATCT
CTACCTGAAGGCAAGAGTGTGTGAGAACTGCGTGGAGGTGGAT
Amino acids

(SEQ ID NO: 3)

QDGNEEMGDTTQNPYKVSISGTTVTLTCPRYDGHEIKWLVNSQNKEGHE
DHLLLEDFSEMEQSGYYACLSKETPAEEASHYLYLKARVCENCVEVD
CD3epsilon Saguinus oedipus
Nucleotides
CAGGACGGTAATGAAGAAATGGGTGATACTACACAGAACCCATATAAAG
TTTCCATCTCAGGAACCACAGTAACACTGACATGCCCTCGGTATGATGGA
CATGAAATAAAATGGCTTGTAAATAGTCAAAACAAAGAAGGTCATGAGGA
CCACCTGTTACTGGAGGATTTTTCGGAAATGGAGCAAAGTGGTTATTAT
GCCTGCCTCTCCAAAGAGACTCCCGCAGAAGAGGCGAGCCATTATCTC
TACCTGAAGGCAAGAGTGTGTGAGAACTGCGTGGAGGTGGAT
Amino acids

(SEQ ID NO: 5)

QDGNEEMGDTTQNPYKVSISGTTVTLTCPRYDGHEIKWLVNSQNKEGHE
DHLLLEDFSEMEQSGYYACLSKETPAEEASHYLYLKARVCENCVEVD
CD3epsilon Saimiris ciureus
Nucleotides
CAGGACGGTAATGAAGAGATTGGTGATACTACCCAGAACCCATATAAAG
TTTCCATCTCAGGAACCACAGTAACACTGACATGCCCTCGGTATGATGGA
CAGGAAATAAAATGGCTCGTAAATGATCAAAACAAAGAAGGTCATGAGGA
CCACCTGTTACTGGAAGATTTTTCAGAAATGGAACAAAGTGGTTATTAT
GCCTGCCTCTCCAAAGAGACCCCCACAGAAGAGGCGAGCCATTATCT
CTACCTGAAGGCAAGAGTGTGTGAGAACTGCGTGGAGGTGGAT
Amino acids

(SEQ ID NO: 7)

QDGNEEIGDTTQNPYKVSISGTTVTLTCPRYDGQEIKWLVNDQNKEGHE
DHLLLEDFSEMEQSGYYACLSKETPTEEASHYLYLKARVCENCVEVD

### 2. Generation of Cross-Species Specific Single Chain Antibody Fragments (scFv) Binding to the N-Terminal Amino Acids 1-27 of CD3Epsilon of Man and Different Non-Chimpanzee Primates

[0359] 2.1. Immunization of Mice Using the N-Terminus of CD3Epsilon Separated from its Native CD3-Context by Fusion to a Heterologous Soluble Protein

[0360] Ten weeks old F1 mice from balb/c×C57black crossings were immunized with the CD3epsilon-Fc fusion protein carrying themost N-terminal amino acids 1-27 of the mature CD3epsilon chain (1-27 CD3-Fc) of man and/or saimiris ciureus. To this end 40 μg of the 1-27 CD3-Fc fusion protein with 10 nmol of a thioate-modified CpG-Oligonucleotide (5′-tccatgacgttcctgatgct-3′) (SEQ ID No. 343) in 300 ul PBS were injected per mouse intra-peritoneally. Mice receive booster immunizations after 21, 42 and optionally 63 days in the same way. Ten days after the first booster immunization, blood samples were taken and antibody serum titer against 1-27 CD3-Fc fusion protein iwa tested by ELISA. Additionally, the titer against the CD3-positive human T cell line HPBaII was tested in flow cytometry according to standard protocols. Serum titers were significantly higher in immunized than in non-immunized animals.

2.2. Generation of an Immune Murine Antibody scFv Library: Construction of a Combinatorial Antibody Library and Phage Display

[0361] Three days after the last injection the murine spleen cells were harvested for the preparation of total RNA according to standard protocols.

[0362] A library of murine immunoglobuline (Ig) light chain (kappa) variable region (VK) and Ig heavy chain variable region (VH) DNA-fragments was constructed by RT-PCR on murine spleen RNA using VK- and VH specific primer. cDNA was synthesized according to standard protocols.

[0363] The primers were designed in a way to give rise to a 5′-XhoI and a 3′-BstEII recognition site for the amplified heavy chain V-fragments and to a 5′-SacI and a 3′-SpeI recognition site for amplified VK DNA fragments.

[0364] For the PCR-amplification of the VH DNA-fragments eight different 5′-VH-family specific primers (MVH1(GC)AG GTG CAG CTC GAG GAG TCA GGA CCT (SEQ ID No. 344); MVH2 GAG GTC CAG CTC GAG CAG TCT GGA CCT (SEQ ID No. 345); MVH3 CAG GTC CAA CTC GAG CAG CCT GGG GCT (SEQ ID No. 346); MVH4 GAG GTT CAG CTC GAG CAG TCT GGG GCA (SEQ ID No. 347); MVH5 GA(AG) GTG AAG CTC GAG GAG TCT GGA GGA (SEQ ID No. 348); MVH6 GAG GTG AAG CTT CTC GAG TCT GGA GGT (SEQ ID No. 349); MVH7 GAA GTG AAG CTC GAG GAG TCT GGG GGA (SEQ ID No. 350); MVH8 GAG GTT CAG CTC GAG CAG TCT GGA GCT (SEQ ID No. 351)) were each combined with one 3′-VH primer (3′MuVHBstEII tga gga gac ggt gac cgt ggt ccc ttg gcc cca g (SEQ ID No. 352)); for the PCR amplification of the VK-chain fragments seven different 5′-VK-family specific primers (MUVK1 CCA GTT CCG AGC TCG TTG TGA CTC AGG AAT CT (SEQ ID No. 353); MUVK2 CCA GTT CCG AGC TCG TGT TGA CGC AGC CGC CC (SEQ ID No. 354); MUVK3 CCA GTT CCG AGC TCG TGC TCA CCC AGT CTC CA (SEQ ID No. 355); MUVK4 CCA GTT CCG AGC TCC AGA TGA CCC AGT CTC CA (SEQ ID No. 356); MUVK5 CCA GAT GTG AGC TCG TGA TGA CCC AGA CTC CA (SEQ ID No. 357); MUVK6 CCA GAT GTG AGC TCG TCA TGA CCC AGT CTC CA (SEQ ID No. 358); MUVK7 CCA GTT CCG AGC TCG TGA TGA CAC AGT CTC CA (SEQ ID No. 359)) were each combined with one 3′-VK primer (3′MuVkHindIII/BsiW1 tgg tgc act agt cgt acg ttt gat ctc aag ctt ggt ccc (SEQ ID No. 360)).

[0365] The following PCR program was used for amplification: denaturation at 94° C. for 20 sec; primer annealing at 52° C. for 50 sec and primer extension at 72° C. for 60 sec and 40 cycles, followed by a 10 min final extension at 72° C.

[0366] 450 ng of the kappa light chain fragments (SacI-SpeI digested) were ligated with 1400 ng of the phagemid pComb3H₅Bhis (SacI-SpeI digested; large fragment). The resulting combinatorial antibody library was then transformed into 300 ul of electrocompetent Escherichia coli XL1 Blue cells by electroporation (2.5 kV, 0.2 cm gap cuvette, 25 uFD, 200 Ohm, Biorad gene-pulser) resulting in a library size of more than 10⁷ independent clones. After one hour of phenotype expression, positive transformants were selected for carbenicilline resistance encoded by the pComb3H₅BHis vector in 100 ml of liquid super broth (SB)-culture over night. Cells were then harvested by centrifugation and plasmid preparation was carried out using a commercially available plasmid preparation kit (Qiagen).

[0367] 2800 ng of this plasmid-DNA containing the VK-library (XhoI-BstEII digested; large fragment) were ligated with 900 ng of the heavy chain V-fragments (XhoI-BstEII digested) and again transformed into two 300 ul aliquots of electrocompetent E. coli XL1 Blue cells by electroporation (2.5 kV, 0.2 cm gap cuvette, 25 uFD, 200 Ohm) resulting in a total VH-VK scFv (single chain variable fragment) library size of more than 10⁷ independent clones.

[0368] After phenotype expression and slow adaptation to carbenicillin, the E. coli cells containing the antibody library were transferred into SB-Carbenicillin (50 ug/mL) selection medium. The E. coli cells containing the antibody library wass then infected with an infectious dose of 10¹² particles of helper phage VCSM13 resulting in the production and secretion of filamentous M13 phage, wherein phage particle contains single stranded pComb3H₅BHis-DNA encoding a murine scFv-fragment and displayed the corresponding scFv-protein as a translational fusion to phage coat protein III. This pool of phages displaying the antibody library was later used for the selection of antigen binding entities.

### 2.3. Phage Display Based Selection of CD3-Specific Binders

[0369] The phage library carrying the cloned scFv-repertoire was harvested from the respective culture supernatant by PEG8000/NaCl precipitation and centrifugation. Approximately 10¹¹ to 10¹² scFv phage particles were resuspended in 0.4 ml of PBS/0.1% BSA and incubated with 10⁵ to 10⁷ Jurkat cells (a CD3-positive human T-cell line) for 1 hour on ice under slow agitation. These Jurkat cells were grown beforehand in RPMI medium enriched with fetal calf serum (10%), glutamine and penicillin/streptomycin, harvested by centrifugation, washed in PBS and resuspended in PBS/1% FCS (containing Na Azide). scFv phage which do not specifically bind to the Jurkat cells were eliminated by up to five washing steps with PBS/1% FCS (containing Na Azide). After washing, binding entities were eluted from the cells by resuspending the cells in HCl-glycine pH 2.2 (10 min incubation with subsequent vortexing) and after neutralization with 2 M Tris pH 12, the eluate was used for infection of a fresh uninfected E. coli XL1 Blue culture (OD600>0.5). The E. coli culture containing E. coli cells successfully transduced with a phagemid copy, encoding a human scFv-fragment, were again selected for carbenicillin resistance and subsequently infected with VCMS 13 helper phage to start the second round of antibody display and in vitro selection. A total of 4 to 5 rounds of selections were carried out, normally.

### 2.4. Screening for CD3-Specific Binders

[0370] Plasmid DNA corresponding to 4 and 5 rounds of panning was isolated from E. coli cultures after selection. For the production of soluble scFv-protein, VH-VL-DNA fragments were excised from the plasmids (XhoI-SpeI). These fragments were cloned via the same restriction sites in the plasmid pComb3H₅BFlag/His differing from the original pComb3H₅BHis in that the expression construct (e.g. scFv) includes a Flag-tag (TGD YKDDDDK) between the scFv and the His6-tag and the additional phage proteins were deleted. After ligation, each pool (different rounds of panning) of plasmid DNA was transformed into 100 μl heat shock competent E. coli TG1 or XLI blue and plated onto carbenicillin LB-agar. Single colonies were picked into 100 ul of LB carb (50 ug/ml).

[0371] E. coli transformed with pComb3H₅BHis containing a VL- and VH-segment produce soluble scFv in sufficient amounts after excision of the gene III fragment and induction with 1 mM IPTG. Due to a suitable signal sequence, the scFv-chain was exported into the periplasma where it folds into a functional conformation.

[0372] Single E. coli TG1 bacterial colonies from the transformation plates were picked for periplasmic small scale preparations and grown in SB-medium (e.g. 10 ml) supplemented with 20 mM MgCl2 and carbenicillin 50 μg/ml (and re-dissolved in PBS (e.g. 1 ml) after harvesting. By four rounds of freezing at −70° C. and thawing at 37° C., the outer membrane of the bacteria was destroyed by temperature shock and the soluble periplasmic proteins including the scFvs were released into the supernatant. After elimination of intact cells and cell-debris by centrifugation, the supernatant containing the human anti-human CD3-scFvs was collected and used for further examination.

### 2.5. Identification of CD3-Specific Binders

[0373] Binding of the isolated scFvs was tested by flow cytometry on eukaryotic cells, which on their surface express a heterologous protein displaying at its N-terminus the first 27 N-terminal amino acids of CD3epsilon.

[0374] As described in Example 4, the first amino acids 1-27 of the N-terminal sequence of the mature CD3 epsilon chain of the human T cell receptor complex (amino acid sequence: QDGNEEMGGITQTPYKVSISGTTVILT SEQ ID NO: 2) were fused to the N-terminus of the transmembrane protein EpCAM so that the N-terminus was located at the outer cell surface. Additionally, a FLAG epitope was inserted between the N-terminal 1-27 CD3epsilon sequence and the EpCAM sequence. This fusion product was expressed in human embryonic kidney (HEK) and chinese hamster ovary (CHO) cells.

[0375] Eukaryotic cells displaying the 27 most N-terminal amino acids of mature CD3epsilon of other primate species were prepared in the same way for Saimiri ciureus (Squirrel monkey) (CD 3 epsilon N-terminal amino acid sequence: QDGNEEIGDTTQNPYKVSISGTTVTLT SEQ ID NO: 8), for Callithrix jacchus (C D 3 epsilon N-terminal amino acid sequence: QDGNEEMGDTTQNPYKVSISGTTVTLT SEQ ID NO: 4) and for Saguinus oedipus (C D 3 epsilon N-terminal amino acid sequence: QDGNEEMGDTTQNPYKVSISGTTVTLT SEQ ID NO: 6).

[0376] For flow cytometry 2.5×10⁵ cells are incubated with 50 ul supernatant or with 5 μg/ml of the purified constructs in 50 μl PBS with 2% FCS. The binding of the constructs was detected with an anti-His antibody (Penta-His Antibody, BSA free, Qiagen GmbH, Hilden, FRG) at 2 μg/ml in 50 μl PBS with 2% FCS. As a second step reagent a R-Phycoerythrin-conjugated affinity purified F(ab′)2 fragment, goat anti-mouse IgG (Fc-gamma fragment specific), diluted 1:100 in 50 μl PBS with 2% FCS (Dianova, Hamburg, FRG) was used. The samples were measured on a FACSscan (BD biosciences, Heidelberg, FRG).

[0377] Binding was always confirmed by flowcytometry as described in the foregoing paragraph on primary T cells of man and different primates (e.g. saimiris ciureus, callithrix jacchus, saguinus oedipus).

2.6. Generation of Human/Humanized Equivalents of Non-Human CD3Epsilon Specific scFvs

[0378] The VH region of the murine anti-CD3 scFv was aligned against human antibody germline amino acid sequences. The human antibody germline VH sequence was chosen which has the closest homology to the non-human VH and a direct alignment of the two amino acid sequences was performed. There were a number of framework residues of the non-human VH that differ from the human VH framework regions (“different framework positions”). Some of these residues may contribute to the binding and activity of the antibody to its target.

[0379] To construct a library that contain the murine CDRs and at every framework position that differs from the chosen human VH sequence both possibilities (the human and the maternal murine amino acid residue), degenerated oligonucleotides were synthesized. These oligonucleotides incorporate at the differing positions the human residue with a probability of 75% and the murine residue with a probability of 25%. For one human VH e.g. six of these oligonucleotides had to be synthesized that overlap in a terminal stretch of approximately 20 nucleotides. To this end every second primer was an antisense primer. Restriction sites needed for later cloning within the oligonucleotides were deleted.

[0380] These primers may have a length of 60 to 90 nucleotides, depending on the number of primers that were needed to span over the whole V sequence.

[0381] These e.g. six primers were mixed in equal amounts (e.g. 1 μl of each primer (primer stocks 20 to 100 μM) to a 20 μl PCR reaction) and added to a PCR mix consisting of PCR buffer, nucleotides and Taq polymerase. This mix was incubated at 94° C. for 3 minutes, 65° C. for 1 minute, 62° C. for 1 minute, 59° C. for 1 minute, 56° C. for 1 minute, 52° C. for 1 minute, 50° C. for 1 minute and at 72° C. for 10 minutes in a PCR cycler. Subsequently the product was run in an agarose gel electrophoresis and the product of a size from 200 to 400 isolated from the gel according to standard methods.

[0382] This PCR product was then used as a template for a standard PCR reaction using primers that incorporate N-terminal and C-terminal suitable cloning restriction sites. The DNA fragment of the correct size (for a VH approximately 350 nucleotides) was isolated by agarose gel electrophoresis according to standard methods. In this way sufficient VH DNA fragment was amplified. This VH fragment was now a pool of VH fragments that have each one a different amount of human and murine residues at the respective differing framework positions (pool of humanized VH). The same procedure was performed for the VL region of the murine anti-CD3 scFv (pool of humanized VL).

[0383] The pool of humanized VH was then combined with the pool of humanized VL in the phage display vector pComb3H₅Bhis to form a library of functional scFvs from which—after display on filamentous phage—anti-CD3 binders were selected, screened, identified and confirmed as described above for the parental non-human (murine) anti-CD3 scFv. Single clones were then analyzed for favorable properties and amino acid sequence. Those scFvs which were closest in amino acid sequence homology to human germline V-segments are preferred particularly those wherein at least one CDR among CDR I and II of VH and CDR I and II of VLkappa or CDR I and II of VLlambda shows more than 80% amino acid sequence identity to the closest respective CDR of all human germline V-segments. Anti-CD3 scFvs were converted into recombinant bispecific single chain antibodies as described in the following Examples 9, 16, and 24.

### 3. Generation of a Recombinant Fusion Protein of the N-Terminal Amino Acids 1-27 of the Human CD3 Epsilon Chain Fused to the Fc-Part of an IgG1 (1-27 CD3-Fc)

### 3.1. Cloning and Expression of 1-27 CD3-Fc

[0384] The coding sequence of the 1-27 N-terminal amino acids of the human CD3 epsilon chain fused to the hinge and Fc gamma region of human immunoglobulin IgG1 as well as an 6 Histidine Tag were obtained by gene synthesis according to standard protocols (cDNA sequence and amino acid sequence of the recombinant fusion protein are listed under SEQ ID NOs 230 and 229). The gene synthesis fragment was designed as to contain first a Kozak site for eukaryotic expression of the construct, followed by an 19 amino acid immunoglobulin leader peptide, followed in frame by the coding sequence of the first 27 amino acids of the extracellular portion of the mature human CD3 epsilon chain, followed in frame by the coding sequence of the hinge region and Fc gamma portion of human IgG1, followed in frame by the coding sequence of a 6 Histidine tag and a stop codon (FIG. 1). The gene synthesis fragment was also designed as to introduce restriction sites at the beginning and at the end of the cDNA coding for the fusion protein. The introduced restriction sites, EcoRI at the 5′ end and SalI at the 3′ end, are utilized in the following cloning procedures. The gene synthesis fragment was cloned via EcoRI and SalI into a plasmid designated pEF-DHFR (pEF-DHFR is described in Mack et al. Proc. Natl. Acad. Sci. USA 92 (1995) 7021-7025 and Raum et al. Cancer Immunol Immunother 50 (2001) 141-150) following standard protocols. A sequence verified plasmid was used for transfection in the FreeStyle 293 Expression System (Invitrogen GmbH, Karlsruhe, Germany) according to the manufacturers protocol. After 3 days cell culture supernatants of the transfectants were harvested and tested for the presence of the recombinant construct in an ELISA assay. Goat anti-human IgG, Fc-gamma fragment specific antibody (obtained from Jackson ImmunoResearch Europe Ltd., Newmarket, Suffolk, UK) was diluted in PBS to 5 μg/ml and coated with 100 μl per well onto a MaxiSorp 96-well ELISA plate (Nunc GmbH & Co. KG, Wiesbaden, Germany) over night at 4° C. Wells were washed with PBS with 0.05% Tween 20 (PBS/Tween and blocked with 3% BSA in PBS (bovine Albumin, fraction V, Sigma-Aldrich Chemie GmbH, Taufkirchen, Germany) for 60 minutes at room temperature (RT). Subsequently, wells were washed again PBS/Tween and then incubated with cell culture supernatants for 60 minutes at RT. After washing wells were incubated with a peroxidase conjugated anti-His6 antibody (Roche Diagnostics GmbH, Roche Applied Science, Mannheim, Germany) diluted 1:500 in PBS with 1% BSA for 60 minutes at RT. Subsequently, wells were washed with 200 μl PBS/Tween and 100 μl of the SIGMAFAST OPD (SIGMAFAST OPD [o-Phenylenediamine dihydrochloride] substrate solution (Sigma-Aldrich Chemie GmbH, Taufkirchen, Germany) was added according to the manufacturers protocol. The reaction was stopped by adding 100 μl 1 M H₂SO₄. Color reaction was measured on a PowerWaveX microplate spectrophotometer (BioTek Instruments, Inc., Winooski, Vt., USA) at 490 nm and subtraction of background absorption at 620 nm. As shown in FIG. 2 presence of the construct as compared to irrelevant supernatant of mock-transfected HEK 293 cells used as negative control was clearly detectable.

### 3.2. Binding Assay of Cross-Species Specific Single Chain Antibodies to 1-27 CD3-Fc.

[0385] Binding of crude preparations of periplasmatically expressed cross-species specific single chain antibodies specific for CD3 epsilon to 1-27 CD3-Fc was tested in an ELISA assay. Goat anti-human IgG, Fc-gamma fragment specific antibody (Jackson ImmunoResearch Europe Ltd., Newmarket, Suffolk, UK) was diluted in PBS to 5 μg/ml and coated with 100 μl per well onto a MaxiSorp 96-well ELISA plate (Nunc GmbH & Co. KG, Wiesbaden, Germany) over night at 4° C. Wells were washed with PBS with 0.05% Tween 20 (PBS/Tween and blocked with PBS with 3% BSA (bovine Albumin, fraction V, Sigma-Aldrich Chemie GmbH, Taufkirchen, Germany) for 60 minutes at RT. Subsequently, wells were washed with PBS/Tween and incubated with supernatants of cells expressing the 1-27 CD3-Fc construct for 60 minutes at RT. Wells were washed with PBS/Tween and incubated with crude preparations of periplasmatically expressed cross-species specific single-chain antibodies as described above for 60 minutes at room temperature. After washing with PBS/Tween wells were incubated with peroxidase conjugated anti-Flag M2 antibody (Sigma-Aldrich Chemie GmbH, Taufkirchen, Germany) diluted 1:10000 in PBS with 1% BSA for 60 minutes at RT. Wells were washed with PBS/Tween and incubated with 100 μl of the SIGMAFAST OPD (OPD [o-Phenylenediamine dihydrochloride] substrate solution (Sigma-Aldrich Chemie GmbH, Taufkirchen, Germany) according to the manufacturers protocol. Color reaction was stopped with 100 μl 1 M H₂SO₄ and measured on a PowerWaveX microplate spectrophotometer (BioTek Instruments, Inc., Winooski, Vt., USA) at 490 nm and subtraction of background absorption at 620 nm. Strong binding of cross-species specific human single chain antibodies specific for CD3 epsilon to the 1-27 CD3-Fc construct compared to a murine anti CD3 single-chain antibody was observed (FIG. 3).

### 4. Generation of Recombinant Transmembrane Fusion Proteins of the N-Terminal Amino Acids 1-27 of CD3 Epsilon from Different Non-Chimpanzee Primates Fused to EpCAM from Cynomolgus Monkey (1-27 CD3-EpCAM)

### 4.1. Cloning and Expression of 1-27 CD3-EpCAM

[0386] CD3 epsilon was isolated from different non-chimpanzee primates (marmoset, tamarin, squirrel monkey) and swine. The coding sequences of the 1-27 N-terminal amino acids of CD3 epsilon chain of the mature human, common marmoset (Callithrix jacchus), cottontop tamarin (Saguinus oedipus), common squirrel monkey (Saimiri sciureus) and domestic swine (Sus scrofa; used as negative control) fused to the N-terminus of Flag tagged cynomolgus EpCAM were obtained by gene synthesis according to standard protocols. cDNA sequence and amino acid sequence of the recombinant fusion proteins are listed under SEQ ID NOs 231 to 240). The gene synthesis fragments were designed as to contain first a BsrGI site to allow fusion in correct reading frame with the coding sequence of a 19 amino acid immunoglobulin leader peptide already present in the target expression vector, which is followed in frame by the coding sequence of the N-terminal 1-27 amino acids of the extracellular portion of the mature CD3 epsilon chains, which is followed in frame by the coding sequence of a Flag tag and followed in frame by the coding sequence of the mature cynomolgus EpCAM transmembrane protein (FIG. 4). The gene synthesis fragments were also designed to introduce a restriction site at the end of the cDNA coding for the fusion protein. The introduced restriction sites BsrGI at the 5′ end and SalI at the 3′ end, were utilized in the following cloning procedures. The gene synthesis fragments were then cloned via BsrGI and SalI into a derivative of the plasmid designated pEF DHFR (pEF-DHFR is described in Mack et al. Proc. Natl. Acad. Sci. USA 92 (1995) 7021-7025), which already contained the coding sequence of the 19 amino acid immunoglobulin leader peptide following standard protocols. Sequence verified plasmids were used to transiently transfect 293-HEK cells using the MATra-A Reagent (IBA GmbH, Göttingen, Germany) and 12 μg of plasmid DNA for adherent 293-HEK cells in 175 ml cell culture flasks according to the manufacturers protocol. After 3 days of cell culture the transfectants were tested for cell surface expression of the recombinant transmembrane protein via an FACS assay according to standard protocols. For that purpose a number of 2.5×10⁵ cells were incubated with the anti-Flag M2 antibody (Sigma-Aldrich Chemie GmbH, Taufkirchen, Germany) at 5 μg/ml in PBS with 2% FCS. Bound antibody was detected with an R-Phycoerythrin-conjugated affinity purified F(ab′)2 fragment, goat anti-mouse IgG, Fc-gamma fragment specific 1:100 in PBS with 2% FCS (Jackson ImmunoResearch Europe Ltd., Newmarket, Suffolk, UK). The samples were measured on a FACScalibur (BD biosciences, Heidelberg, Germany). Expression of the Flag tagged recombinant transmembrane fusion proteins consisting of cynomolgus EpCAM and the 1-27 N-terminal amino acids of the human, marmoset, tamarin, squirrel monkey and swine CD3 epsilon chain respectively on transfected cells was clearly detectable (FIG. 5).

### 4.2. Binding of Cross-Species Specific Anti-CD3 Single Chain Antibodies to the 1-27 CD3-EpCAM

[0387] Binding of crude preparations of periplasmatically expressed cross-species specific anti CD3 single-chain antibodies to the 1-27 N-terminal amino acids of the human, marmoset, tamarin and squirrel monkey CD3 epsilon chains respectively fused to cynomolgus Ep-CAM was tested in an FACS assay according to standard protocols. For that purpose a number of 2.5×10⁵ cells were incubated with crude preparations of periplasmatically expressed cross-species specific anti CD3 single-chain antibodies (preparation was performed as described above and according to standard protocols) and a single-chain murine anti-human CD3 antibody as negative control. As secondary antibody the Penta-His antibody (Qiagen GmbH, Hildesheim, Germany) was used at 5 μg/ml in 50 μl PBS with 2% FCS. The binding of the antibody was detected with an R-Phycoerythrin-conjugated affinity purified F(ab′)2 fragment, goat anti-mouse IgG, Fc-gamma fragment specific, diluted 1:100 in PBS with 2% FCS (Jackson ImmunoResearch Europe Ltd., Newmarket, Suffolk, UK). The samples were measured on a FACScalibur (BD biosciences, Heidelberg, Germany). As shown in FIGS. 6 (A to E) binding of single chain antibodies to the transfectants expressing the recombinant transmembrane fusion proteins consisting of the 1-27 N-terminal amino acids of CD3 epsilon of the human, marmoset, tamarin or squirrel monkey fused to cynomolgus EpCAM was observed. No binding of cross-species specific single chain antibodies was observed to a fusion protein consisting of the 1-27 N-terminal CD3 epsilon of swine fused to cynomolgus EpCAM used as negative control. Multi-primate cross-species specificity of the anti-CD3 single chain antibodies was shown. Signals obtained with the anti Flag M2 antibody and the cross-species specific single chain antibodies were comparable, indicating a strong binding activity of the cross-species specific single chain antibodies to the N-terminal amino acids 1-27 of CD3 epsilon.

### 5. Binding Analysis of Cross-Species Specific Anti-CD3 Single Chain Antibodies by Alanine-Scanning of Mouse Cells Transfected with the Human CD3 Epsilon Chain and its Alanine Mutants

### 5.1. Cloning and Expression of Human Wild-type CD3 Epsilon

[0388] The coding sequence of the human CD3 epsilon chain was obtained by gene synthesis according to standard protocols (cDNA sequence and amino acid sequence of the human CD3 epsilon chain are listed under SEQ ID NOs 242 and 241). The gene synthesis fragment was designed as to contain a Kozak site for eukaryotic expression of the construct and restriction sites at the beginning and the end of the cDNA coding for human CD3 epsilon. The introduced restriction sites EcoRI at the 5′ end and SalI at the 3′ end, were utilized in the following cloning procedures. The gene synthesis fragment was then cloned via EcoRI and SalI into a plasmid designated pEF NEO following standard protocols. pEF NEO was derived of pEF DHFR (Mack et al. Proc. Natl. Acad. Sci. USA 92 (1995) 7021-7025) by replacing the cDNA of the DHFR with the cDNA of the neomycin resistance by conventional molecular cloning. A sequence verified plasmid was used to transfect the murine T cell line EL4 (ATCC No. TIB-39) cultivated in RPMI with stabilized L-glutamine supplemented with 10% FCS, 1% penicillin/streptomycin, 1% HEPES, 1% pyruvate, 1% non-essential amino acids (all Biochrom AG Berlin, Germany) at 37° C., 95% humidity and 7% CO₂. Transfection was performed with the SuperFect Transfection Reagent (Qiagen GmbH, Hilden, Germany) and 2 μg of plasmid DNA according to the manufacturer's protocol. After 24 hours the cells were washed with PBS and cultivated again in the aforementioned cell culture medium with 600 μg/ml G418 for selection (PAA Laboratories GmbH, Pasching, Austria). 16 to 20 days after transfection the outgrowth of resistant cells was observed. After additional 7 to 14 days cells were tested for expression of human CD3 epsilon by FACS analysis according to standard protocols. 2.5×10⁵ cells were incubated with anti-human CD3 antibody UCHT-1 (BD biosciences, Heidelberg, Germany) at 5 μg/ml in PBS with 2% FCS. The binding of the antibody was detected with an R-Phycoerythrin-conjugated affinity purified F(ab′)2 fragment, goat anti-mouse IgG, Fc-gamma fragment specific, diluted 1:100 in PBS with 2% FCS (Jackson ImmunoResearch Europe Ltd., Newmarket, Suffolk, UK). The samples were measured on a FACSCalibur (BD biosciences, Heidelberg, Germany). Expression of human wild-type CD3 on transfected EL4 cells is shown in FIG. 7.

### 5.2. Cloning and Expression of the Cross-Species Specific Anti-CD3 Single Chain Antibodies as IgG1 Antibodies

[0389] In order to provide improved means of detection of binding of the cross-species specific single chain anti-CD3 antibodies H2C HLP, A2J HLP and E2M HLP were converted into IgG1 antibodies with murine IgG1 and human lambda constant regions. cDNA sequences coding for the heavy and light chains of respective IgG antibodies were obtained by gene synthesis according to standard protocols. The gene synthesis fragments for each specificity were designed as to contain first a Kozak site to allow eukaryotic expression of the construct, which is followed by an 19 amino acid immunoglobulin leader peptide (SEQ ID NOs 244 and 243), which is followed in frame by the coding sequence of the respective heavy chain variable region or respective light chain variable region, followed in frame by the coding sequence of the heavy chain constant region of murine IgG1 (SEQ ID NOs 246 and 245) or the coding sequence of the human lambda light chain constant region (SEQ ID NO 248 and 247), respectively. Restriction sites were introduced at the beginning and the end of the cDNA coding for the fusion protein. Restriction sites EcoRI at the 5′ end and SalI at the 3′ end were used for the following cloning procedures. The gene synthesis fragments were cloned via EcoRI and SalI into a plasmid designated pEF DHFR (Mack et al. Proc. Natl. Acad. Sci. USA 92 (1995) 7021-7025) for the heavy chain constructs and pEF ADA (pEF ADA is described in Raum et al., Cancer Immunol Immunother., 50(3), (2001), 141-50) for the light chain constructs) according to standard protocols. Sequence verified plasmids were used for co-transfection of respective light and heavy chain constructs in the FreeStyle 293 Expression System (Invitrogen GmbH, Karlsruhe, Germany) according to the manufacturers protocol. After 3 days cell culture supernatants of the transfectants were harvested and used for the alanine-scanning experiment.

### 5.3. Cloning and Expression of Alanine Mutants of Human CD3 Epsilon for Alanine-Scanning

[0390] 27 cDNA fragments coding for the human CD3 epsilon chain with an exchange of one codon of the wild-type sequence of human CD3 epsilon into a codon coding for alanine (GCC) for each amino acid of amino acids 1-27 of the extracellular domain of the mature human CD3 epsilon chain respectively were obtained by gene synthesis. Except for the exchanged codon the cDNA fragments were identical to the aforementioned human wild-type CD3 cDNA fragment. Only one codon was replaced in each construct compared to the human wild-type CD3 cDNA fragment described above. Restriction sites EcoRI and SalI were introduced into the cDNA fragments at identical positions compared to the wild-type construct. All alanine-scanning constructs were cloned into pEF NEO and sequence verified plasmids were transfected into EL4 cells. Transfection and selection of transfectants was performed as described above. As result a panel of expressed constructs was obtained wherein the first amino acid of the human CD3 epsilon chain, glutamine (Q, Gln) at position 1 was replaced by alanine. The last amino acid replaced by alanine was the threonine (T, Thr) at position 27 of mature human wild-type CD3 epsilon. For each amino acid between glutamine 1 and threonine 27 respective transfectants with an exchange of the wild-type amino acid into alanine were generated.

### 5.4. Alanine-Scanning Experiment

[0391] Chimeric IgG antibodies as described in 5.2 and cross-species specific single chain antibodies specific for CD3 epsilon were tested in alanine-scanning experiment. Binding of the antibodies to the EL4 cell lines transfected with the alanine-mutant constructs of human CD3 epsilon as described in 5.3 was tested by FACS assay according to standard protocols. 2.5×10⁵ cells of the respective transfectants were incubated with 50 μl of cell culture supernatant containing the chimeric IgG antibodies or with 50 μl of crude preparations of periplasmatically expressed single-chain antibodies. For samples incubated with crude preparations of periplasmatically expressed single-chain antibodies the anti-Flag M2 antibody (Sigma-Aldrich Chemie GmbH, Taufkirchen, Germany) was used as secondary antibody at 5 μg/ml in 50 μl PBS with 2% FCS. For samples incubated with the chimeric IgG antibodies a secondary antibody was not necessary. For all samples the binding of the antibody molecules was detected with an R-Phycoerythrin-conjugated affinity purified F(ab′)2 fragment, goat anti-mouse IgG, Fc-gamma fragment specific, diluted 1:100 in PBS with 2% FCS (Jackson ImmunoResearch Europe Ltd., Newmarket, Suffolk, UK). Samples were measured on a FACSCalibur (BD biosciences, Heidelberg, Germany). Differential binding of chimeric IgG molecules or cross-species specific single-chain antibodies to the EL4 cell lines transfected with the alanine-mutants of human CD3 epsilon was detected. As negative control either an isotype control or a crude preparation of a periplasmatically expressed single-chain antibody of irrelevant specificity was used respectively. UCHT-1 antibody was used as positive control for the expression level of the alanine-mutants of human CD3 epsilon. The EL4 cell lines transfected with the alanine-mutants for the amino acids tyrosine at position 15, valine at position 17, isoleucine at position 19, valine at position 24 or leucine at position 26 of the mature CD3 epsilon chain were not evaluated due to very low expression levels (data not shown). Binding of the cross-species specific single chain antibodies and the single chain antibodies in chimeric IgG format to the EL4 cell lines transfected with the alanine-mutants of human CD3 epsilon is shown in FIG. 8 (A-D) as relative binding in arbitrary units with the geometric mean fluorescence values of the respective negative controls subtracted from all respective geometric mean fluorescence sample values. To compensate for different expression levels all sample values for a certain transfectant were then divided through the geometric mean fluorescence value of the UCHT-1 antibody for the respective transfectant. For comparison with the wild-type sample value of a specificity all sample values of the respective specificity were finally divided through the wild-type sample value, thereby setting the wild-type sample value to 1 arbitrary unit of binding.

[0392] The calculations used are shown in detail in the following formula:

$$value\_Sample ( x , y ) = \frac{Sample ( x , y ) - neg\_Contr . ( x )}{\begin{matrix}( UCHT - 1 ( x ) - neg\_Contr . ( x ) ) * \\ \frac{WT ( y ) - neg\_Contr . ( wt )}{UCHT - 1 ( wt ) - neg\_Contr . ( wt )}\end{matrix}}$$

[0393] In this equation value_Sample means the value in arbitrary units of binding depicting the degree of binding of a specific anti-CD3 antibody to a specific alanine-mutant as shown in FIG. 8 (A-D), Sample means the geometric mean fluorescence value obtained for a specific anti-CD3 antibody assayed on a specific alanine-scanning transfectant, neg_Contr. means the geometric mean fluorescence value obtained for the negative control assayed on a specific alanine-mutant, UCHT-1 means the geometric mean fluorescence value obtained for the UCHT-1 antibody assayed on a specific alanine-mutant, WT means the geometric mean fluorescence value obtained for a specific anti-CD3 antibody assayed on the wild-type transfectant, x specifies the respective transfectant, y specifies the respective anti-CD3 antibody and wt specifies that the respective transfectant is the wild-type.

[0394] As can be seen in FIG. 8 (A-D) the IgG antibody A2J HLP showed a pronounced loss of binding for the amino acids asparagine at position 4, threonine at position 23 and isoleucine at position 25 of the mature CD3 epsilon chain. A complete loss of binding of IgG antibody A2J HLP was observed for the amino acids glutamine at position 1, aspartate at position 2, glycine at position 3 and glutamate at position 5 of the mature CD3 epsilon chain. IgG antibody E2M HLP showed a pronounced loss of binding for the amino acids asparagine at position 4, threonine at position 23 and isoleucine at position 25 of the mature CD3 epsilon chain. IgG antibody E2M HLP showed a complete loss of binding for the amino acids glutamine at position 1, aspartate at position 2, glycine at position 3 and glutamate at position 5 of the mature CD3 epsilon chain. IgG antibody H2C HLP showed an intermediate loss of binding for the amino acid asparagine at position 4 of the mature CD3 epsilon chain and it showed a complete loss of binding for the amino acids glutamine at position 1, aspartate at position 2, glycine at position 3 and glutamate at position 5 of the mature CD3 epsilon chain. Single chain antibody F12Q HLP showed an essentially complete loss of binding for the amino acids glutamine at position 1, aspartate at position 2, glycine at position 3 of the mature CD3 epsilon chain and glutamate at position 5 of the mature CD3 epsilon chain.

### 6. Binding Analysis of the Cross-Species Specific Anti-CD3 Binding Molecule H2C HLP to the Human CD3 Epsilon Chain with and Without N-Terminal His6 Tag Transfected into the Murine T Cell Line EL4

[0395] 6.1. Cloning and Expression of the Human CD3 Epsilon Chain with N-Terminal Six Histidine Tag (His6 tag)

[0396] A cDNA fragment coding for the human CD3 epsilon chain with a N-terminal His6 tag was obtained by gene synthesis. The gene synthesis fragment was designed as to contain first a Kozak site for eukaryotic expression of the construct, which is followed in frame by the coding sequence of a 19 amino acid immunoglobulin leader peptide, which is followed in frame by the coding sequence of a His6 tag which is followed in frame by the coding sequence of the mature human CD3 epsilon chain (the cDNA and amino acid sequences of the construct are listed as SEQ ID NOs 256 and 255). The gene synthesis fragment was also designed as to contain restriction sites at the beginning and the end of the cDNA. The introduced restriction sites EcoRI at the 5′ end and SalI at the 3′ end, were used in the following cloning procedures. The gene synthesis fragment was then cloned via EcoRI and SalI into a plasmid designated pEF-NEO (as described above) following standard protocols. A sequence verified plasmid was used to transfect the murine T cell line EL4. Transfection and selection of the transfectants were performed as described above. After 34 days of cell culture the transfectants were used for the assay described below.

6.2. Binding of the Cross-Species Specific Anti-CD3 Binding Molecule H2C HLP to the Human CD3 Epsilon Chain with and without N-Terminal His6 Tag

[0397] A chimeric IgG antibody with the binding specificity H2C HLP specific for CD3 epsilon was tested for binding to human CD3 epsilon with and without N-terminal His6 tag. Binding of the antibody to the EL4 cell lines transfected the His6-human CD3 epsilon and wild-type human CD3 epsilon respectively was tested by an FACS assay according to standard protocols. 2.5×10⁵ cells of the transfectants were incubated with 50 μl of cell culture supernatant containing the chimeric IgG antibody or 50 μl of the respective control antibodies at 5 μg/ml in PBS with 2% FCS. As negative control an appropriate isotype control and as positive control for expression of the constructs the CD3 specific antibody UCHT-1 were used respectively. The binding of the antibodies was detected with a R-Phycoerythrin-conjugated affinity purified F(ab′)2 fragment, goat anti-mouse IgG, Fc-gamma fragment specific, diluted 1:100 in PBS with 2% FCS (Jackson ImmunoResearch Europe Ltd., Newmarket, Suffolk, UK). Samples were measured on a FACSCalibur (BD biosciences, Heidelberg, Germany). Compared to the EL4 cell line transfected with wild-type human CD3 epsilon a clear loss of binding of the chimeric IgG with binding specificity H2C HLP to human-CD3 epsilon with an N-terminal His6 tag was detected. These results showed that a free N-terminus of CD3 epsilon is essential for binding of the cross-species specific anti-CD3 binding specificity H2C HLP to the human CD3 epsilon chain (FIG. 9).

### 7. Cloning and Expression of the C-Terminal, Transmembrane and Truncated Extracellular Domains of Human MCSP

[0398] The coding sequence of the C-terminal, transmembrane and truncated extracellular domain of human MCSP (amino acids 1538-2322) was obtained by gene synthesis according to standard protocols (cDNA sequence and amino acid sequence of the recombinant construct for expression of the C-terminal, transmembrane and truncated extracellular domain of human MCSP (designated as human D3) are listed under SEQ ID NOs 250 and 249). The gene synthesis fragment was designed as to contain first a Kozak site to allow eukaryotic expression of the construct followed by the coding sequence of an 19 amino acid immunoglobulin leader peptide followed in frame by a FLAG tag, followed in frame by a sequence containing several restriction sites for cloning purposes and coding for a 9 amino acid artificial linker (SRTRSGSQL), followed in frame by the coding sequence of the C-terminal, transmembrane and truncated extracellular domain of human MCSP and a stop codon. Restriction sites were introduced at the beginning and at the end of the DNA fragment. The restriction sites EcoRI at the 5′ end and SalI at the 3′ end were used in the following cloning procedures. The fragment was digested with EcoRI and SalI and cloned into pEF-DHFR (pEF-DHFR is described in Mack et al. Proc. Natl. Acad. Sci. USA 92 (1995) 7021-7025) following standard protocols. A sequence verified plasmid was used to transfect CHO/dhfr− cells (ATCC No. CRL 9096). Cells were cultivated in RPMI 1640 with stabilized glutamine, supplemented with 10% FCS, 1% penicillin/streptomycin (all obtained from Biochrom AG Berlin, Germany) and nucleosides from a stock solution of cell culture grade reagents (Sigma-Aldrich Chemie GmbH, Taufkirchen, Germany) to a final concentration of 10 μg/ml Adenosine, 10 μg/ml Deoxyadenosine and 10 μg/ml Thymidine, in an incubator at 37° C., 95% humidity and 7% CO₂. Transfection was performed using the PolyFect Transfection Reagent (Qiagen GmbH, Hilden, Germany) and 5 μg of plasmid DNA according to the manufacturer's protocol. After cultivation for 24 hours cells were washed once with PBS and cultivated again in RPMI 1640 with stabilized glutamine and 1% penicillin/streptomycin. Thus the cell culture medium did not contain nucleosides and thereby selection was applied on the transfected cells. Approximately 14 days after transfection the outgrowth of resistant cells was observed. After an additional 7 to 14 days the transfectants were tested for expression of the construct by FACS analysis. 2.5×10⁵ cells were incubated with 50 μl of an anti-Flag-M2 antibody (Sigma-Aldrich Chemie GmbH, Taufkirchen, Germany) diluted to 5 μg/ml in PBS with 2% FCS. The binding of the antibody was detected with a R-Phycoerythrin-conjugated affinity purified F(ab′)2 fragment, goat anti-mouse IgG, Fc-gamma fragment specific diluted 1:100 in PBS with 2% FCS (ImmunoResearch Europe Ltd., Newmarket, Suffolk, UK). The samples were measured on a FACScalibur (BD biosciences, Heidelberg, Germany).

### 8. Cloning and Expression of the C-Terminal, Transmembrane and Truncated Extracellular Domains of Macaque MCSP

[0399] The cDNA sequence of the C-terminal, transmembrane and truncated extracellular domains of macaque MCSP (designated as macaque D3) was obtained by a set of three PCRs on macaque skin cDNA (Cat No. C1534218-Cy-BC; BioCat GmbH, Heidelberg, Germany) using the following reaction conditions: 1 cycle at 94° C., 3 min., 40 cycles with 94° C. for 0.5 min., 52° C. for 0.5 min. and 72° C. for 1.75 min., terminal cycle of 72° C. for 3 min. The following primers were used:

forward primer:

(SEQ ID No. 361)

5′-GATCTGGTCTACACCATCGAGC-3′
reverse primer:

(SEQ ID No. 362)

5′-GGAGCTGCTGCTGGCTCAGTGAGG-3′
forward primer:

(SEQ ID No. 363)

5′-TTCCAGCTGAGCATGTCTGATGG-3′
reverse primer:

(SEQ ID No. 364)

5′-CGATCAGCATCTGGGCCCAGG-3′
forward primer:

(SEQ ID No. 365)

5′-GTGGAGCAGTTCACTCAGCAGGACC-3′
reverse primer:

(SEQ ID No. 366)

5′-GCCTTCACACCCAGTACTGGCC-3′

[0400] Those PCRs generated three overlapping fragments (A: 1-1329, B: 1229-2428, C: 1782-2547) which were isolated and sequenced according to standard protocols using the PCR primers and thereby provided a 2547 by portion of the cDNA sequence of macaque MCSP (the cDNA sequence and amino acid sequence of this portion of macaque MCSP are listed under SEQ ID NOs 252 and 251) from 74 by upstream of the coding sequence of the C-terminal domain to 121 by downstream of the stop codon. Another PCR using the following reaction conditions: 1 cycle at 94° C. for 3 min, 10 cycles with 94° C. for 1 min, 52° C. for 1 min and 72° C. for 2.5 min, terminal cycle of 72° C. for 3 min was used to fuse the PCR products of the aforementioned reactions A and B. The following primers are used:

forward primer:

(SEQ ID No. 367)

5′-tcccgtacgagatctggatcccaattggatggcggactcgtgctgtt
ctcacacagagg-3′
reverse primer:

(SEQ ID No. 368)

5′-agtgggtcgactcacacccagtactggccattcttaaggg
caggg-3′

[0401] The primers for this PCR were designed to introduce restriction sites at the beginning and at the end of the cDNA fragment coding for the C-terminal, transmembrane and truncated extracellular domains of macaque MCSP. The introduced restriction sites MfeI at the 5′ end and SalI at the 3′ end, were used in the following cloning procedures. The PCR fragment was then cloned via MfeI and SalI into a Bluescript plasmid containing the EcoRI/MfeI fragment of the aforementioned plasmid pEF-DHFR (pEF-DHFR is described in Raum et al. Cancer Immunol Immunother 50 (2001) 141-150) by replacing the C-terminal, transmembrane and truncated extracellular domains of human MCSP. The gene synthesis fragment contained the coding sequences of the immunoglobulin leader peptide and the Flag tag as well as the artificial linker (SRTRSGSQL) in frame to the 5′ end of the cDNA fragment coding for the C-terminal, transmembrane and truncated extracellular domains of macaque MCSP. This vector was used to transfect CHO/dhfr− cells (ATCC No. CRL 9096). Cells were cultivated in RPMI 1640 with stabilized glutamine supplemented with 10% FCS, 1% penicillin/streptomycin (all from Biochrom AG Berlin, Germany) and nucleosides from a stock solution of cell culture grade reagents (Sigma-Aldrich Chemie GmbH, Taufkirchen, Germany) to a final concentration of 10 μg/ml Adenosine, 10 μg/ml Deoxyadenosine and 10 μg/ml Thymidine, in an incubator at 37° C., 95% humidity and 7% CO2. Transfection was performed with PolyFect Transfection Reagent (Qiagen GmbH, Hilden, Germany) and 5 μg of plasmid DNA according to the manufacturer's protocol. After cultivation for 24 hours cells were washed once with PBS and cultivated again in RPMI 1640 with stabilized glutamine and 1% penicillin/streptomycin. Thus the cell culture medium did not contain nucleosides and thereby selection was applied on the transfected cells.

[0402] Approximately 14 days after transfection the outgrowth of resistant cells is observed. After an additional 7 to 14 days the transfectants were tested for expression of the recombinant construct via FACS. 2.5×10⁵ cells were incubated with 50 μl of an anti-Flag-M2 antibody (Sigma-Aldrich Chemie GmbH, Taufkirchen, Germany) diluted to 5 μg/ml in PBS with 2% FCS. Bound antibody was detected with a R-Phycoerythrin-conjugated affinity purified F(ab′)2 fragment, goat anti-mouse IgG, Fc-gamma fragment specific, diluted 1:100 in PBS with 2% FCS (Jackson ImmunoResearch Europe Ltd., Newmarket, Suffolk, UK). Samples were measured on a FACScalibur (BD biosciences, Heidelberg, Germany).

### 9. Generation and Characterisation of MCSP and CD3 Cross-Species Specific Bispecific Single Chain Molecules

[0403] Bispecific single chain antibody molecules each comprising a binding domain cross-species specific for human and non-chimpanzee primate CD3 epsilon as well as a binding domain cross-species-specific for human and non-chimpanzee primate MCSP, are designed as set out in the following Table 1:

TABLE 1
Formats of MCSP and CD3 cross-species specific
bispecific single chain antibodies

| SEQ ID | Formats of protein constructs |
|---|---|
| (nucl/prot) | (N → C) |
| 190/189 | MCSP-G4 HL × H2C HL |
| 192/191 | MCSP-G4 HL × F12Q HL |
| 194/193 | MCSP-G4 HL × I2C HL |
| 196/195 | MCSP-G4 HLP × F6A HLP |
| 198/197 | MCSP-G4 HLP × H2C HLP |
| 202/201 | MCSP-G4 HLP × G4H HLP |
| 206/205 | MCSP-G4 HLP × E1L HLP |
| 208/207 | MCSP-G4 HLP × E2M HLP |
| 212/211 | MCSP-G4 HLP × F12Q HL |
| 214/213 | MCSP-G4 HLP × I2C HL |
| 216/215 | MCSP-D2 HL × H2C HL |
| 218/217 | MCSP-D2 HL × F12Q HL |
| 220/219 | MCSP-D2 HL × I2C HL |
| 222/221 | MCSP-D2 HLP × H2C HLP |
| 224/223 | MCSP-F9 HL × H2C HL |
| 226/225 | MCSP-F9 HLP × H2C HLP |
| 228/227 | MCSP-F9 HLP × G4H HLP |
| 318/317 | MCSP-A9 HL × H2C HL |
| 320/319 | MCSP-A9 HL × F12Q HL |
| 322/321 | MCSP-A9 HL × I2C HL |
| 324/323 | MCSP-C8 HL × I2C HL |
| 328/327 | MCSP-B7 HL × I2C HL |
| 326/325 | MCSP-B8 HL × I2C HL |
| 330/329 | MCSP-G8 HL × I2C HL |
| 332/331 | MCSP-D5 HL × I2C HL |
| 334/333 | MCSP-F7 HL × I2C HL |
| 336/335 | MCSP-G5 HL × I2C HL |
| 338/337 | MCSP-F8 HL × I2C HL |
| 340/339 | MCSP-G10 HL × I2C HL |

[0404] The aforementioned constructs containing the variable heavy-chain (VH) and variable light-chain (VL) domains cross-species specific for human and macaque MCSP D3 and the VH and VL domains cross-species specific for human and macaque CD3 were obtained by gene synthesis. The gene synthesis fragments were designed as to contain first a Kozak site for eukaryotic expression of the construct, followed by a 19 amino acid immunoglobulin leader peptide, followed in frame by the coding sequence of the respective bispecific single chain antibody molecule, followed in frame by the coding sequence of a histidine₆-tag and a stop codon. The gene synthesis fragment was also designed as to introduce suitable N- and C-terminal restriction sites. The gene synthesis fragment was cloned via these restriction sites into a plasmid designated pEF-DHFR (pEF-DHFR is described in Raum et al. Cancer Immunol Immunother 50 (2001) 141-150) according to standard protocols (Sambrook, Molecular Cloning; A Laboratory Manual, 3rd edition, Cold Spring Harbour Laboratory Press, Cold Spring Harbour, New York (2001)). The constructs were transfected stably or transiently into DHFR-deficient CHO-cells (ATCC No. CRL 9096) by electroporation or alternatively into HEK 293 (human embryonal kidney cells, ATCC Number: CRL-1573) in a transient manner according to standard protocols.

[0405] Eukaryotic protein expression in DHFR deficient CHO cells (ATCC No. CRL 9096) was performed as described by Kaufmann R. J. (1990) Methods Enzymol. 185, 537-566. Gene amplification of the constructs was induced by addition of increasing concentrations of methothrexate (MTX) up to final concentrations of 20 nM MTX. After two passages of stationary culture the cells were grown in roller bottles with nucleoside-free HyQ PF CHO liquid soy medium (with 4.0 mM L-Glutamine with 0.1% Pluronic F-68; HyClone) for 7 days before harvest. The cells were removed by centrifugation and the supernatant containing the expressed protein is stored at −20° C.

[0406] Äkta® Explorer System (GE Health Systems) and Unicorn® Software were used for chromatography. Immobilized metal affinity chromatography (“IMAC”) was performed using a Fractogel EMD Chelate® (Merck) which was loaded with ZnCl₂ according to the protocol provided by the manufacturer. The column was equilibrated with buffer A (20 mM sodium phosphate buffer pH 7.2, 0.1 M NaCl) and the cell culture supernatant (500 ml) was applied to the column (10 ml) at a flow rate of 3 ml/min. The column was washed with buffer A to remove unbound sample. Bound protein was eluted using a two step gradient of buffer B (20 mM sodium phosphate buffer pH 7.2, 0.1 M NaCl, 0.5 M Imidazole) according to the following:

[0407] Step 1: 20% buffer B in 6 column volumes

[0408] Step 2: 100% buffer B in 6 column volumes

[0409] Eluted protein fractions from step 2 were pooled for further purification. All chemicals are of research grade and purchased from Sigma (Deisenhofen) or Merck (Darmstadt).

[0410] Gel filtration chromatography was performed on a HiLoad 16/60 Superdex 200 prep grade column (GE/Amersham) equilibrated with Equi-buffer (25 mM Citrate, 200 mM Lysine, 5% Glycerol, pH 7.2). Eluted protein samples (flow rate 1 ml/min) were subjected to standard SDS-PAGE and Western Blot for detection. Prior to purification, the column was calibrated for molecular weight determination (molecular weight marker kit, Sigma MW GF-200). Protein concentrations were determined using OD280 nm.

[0411] Purified bispecific single chain antibody protein was analyzed in SDS PAGE under reducing conditions performed with pre-cast 4-12% Bis Tris gels (Invitrogen). Sample preparation and application were performed according to the protocol provided by the manufacturer. The molecular weight was determined with MultiMark protein standard (Invitrogen). The gel was stained with colloidal Coomassie (Invitrogen protocol). The purity of the isolated protein is >95% as determined by SDS-PAGE.

[0412] The bispecific single chain antibody has a molecular weight of about 52 kDa under native conditions as determined by gel filtration in phosphate buffered saline (PBS). All constructs were purified according to this method.

[0413] Western Blot was performed using an Optitran® BA-S83 membrane and the Invitrogen Blot Module according to the protocol provided by the manufacturer. For detection of the bispecific single chain antibody protein antibodies an anti-His Tag antibody was used (Penta His, Qiagen). A Goat-anti-mouse Ig antibody labeled with alkaline phosphatase (AP) (Sigma) was used as secondary antibody and BCIP/NBT (Sigma) as substrate. A single band was detected at 52 kD corresponding to the purified bispecific single chain antibody.

[0414] Alternatively, constructs were transiently expressed in DHFR deficient CHO cells. In brief, 4×105 cells per construct were cultivated in 3 ml RPMI 1640 all medium with stabilized glutamine supplemented with 10% fetal calf serum, 1% penicillin/streptomycin and nucleosides from a stock solution of cell culture grade reagents (Sigma-Aldrich Chemie GmbH, Taufkirchen, Germany) to a final concentration of 10 μg/ml Adenosine, 10 μg/ml Deoxyadenosine and 10 μg/ml Thymidine, in an incubator at 37° C., 95% humidity and 7% CO2 one day before transfection. Transfection was performed with Fugene 6 Transfection Reagent (Roche, # 11815091001) according to the manufacturer's protocol. 94 μl OptiMEM medium (Invitrogen) and 6 μl Fugene 6 are mixed and incubated for 5 minutes at room temperature. Subsequently, 1.5 μg DNA per construct were added, mixed and incubated for 15 minutes at room temperature. Meanwhile, the DHFR deficient CHO cells were washed with 1×PBS and resuspended in 1.5 ml RPMI 1640 all medium. The transfection mix was diluted with 600 μl RPMI 1640 all medium, added to the cells and incubated overnight at 37° C., 95% humidity and 7% CO2. The day after transfection the incubation volume of each approach was extended to 5 ml RPMI 1640 all medium. Supernatant was harvested after 3 days of incubation.

### 10. Flow Cytometric Binding Analysis of the MCSP and CD3 Cross-Species Specific Bispecific Antibodies

[0415] In order to test the functionality of the cross-species specific bispecific antibody constructs regarding the capability to bind to human and macaque MCSP D3 and CD3, respectively, a FACS analysis was performed. For this purpose CHO cells transfected with human MCSP D3 (as described in Example 7) and the human CD3 positive T cell leukemia cell line HPB-ALL (DSMZ, Braunschweig, ACC483) were used to test the binding to human antigens. The binding reactivity to macaque antigens was tested by using the generated macaque MCSP D3 transfectant (described in Example 8) and a macaque T cell line 4119LnPx (kindly provided by Prof. Fickenscher, Hygiene Institute, Virology, Erlangen-Nuernberg; published in Knappe A, et al., and Fickenscher H., Blood 2000, 95, 3256-61). 200.000 cells of the respective cell lines were incubated for 30 min on ice with 50 μl of the purified protein of the cross-species specific bispecific antibody constructs (2 μg/ml) or cell culture supernatant of transfected cells expressing the cross-species specific bispecific antibody constructs. The cells were washed twice in PBS with 2% FCS and binding of the construct was detected with a murine anti-His antibody (Penta His antibody; Qiagen; diluted 1:20 in 50 μl PBS with 2% FCS). After washing, bound anti-His antibodies were detected with an Fc gamma-specific antibody (Dianova) conjugated to phycoerythrin, diluted 1:100 in PBS with 2% FCS. Supernatant of untransfected CHO cells was used as negative control for binding to the T cell lines. A single chain construct with irrelevant target specificity was used as negative control for binding to the MCSP-D3 transfected CHO cells.

[0416] Flow cytometry was performed on a FACS-Calibur apparatus; the CellQuest software was used to acquire and analyze the data (Becton Dickinson biosciences, Heidelberg). FACS staining and measuring of the fluorescence intensity were performed as described in Current Protocols in Immunology (Coligan, Kruisbeek, Margulies, Shevach and Strober, Wiley-Interscience, 2002).

[0417] The bispecific binding of the single chain molecules listed above, which are cross-species specific for MCSP D3 and cross-species specific for human and macaque CD3 was clearly detectable as shown in FIGS. 10, 11, 12 and 39. In the FACS analysis all constructs showed binding to CD3 and MCSP D3 as compared to the respective negative controls. Cross-species specificity of the bispecific antibodies to human and macaque CD3 and MCSP D3 antigens was demonstrated.

### 11. Bioactivity of MCSP and CD3 Cross-Species Specific Bispecific Single Chain Antibodies

[0418] Bioactivity of the generated bispecific single chain antibodies was analyzed by chromium 51 (⁵¹Cr) release in vitro cytotoxicity assays using the MCSP D3 positive cell lines described in Examples 7 and 8. As effector cells stimulated human CD4/CD56 depleted PBMC, stimulated human PBMC or the macaque T cell line 4119LnPx are used as specified in the respective figures.

[0419] Generation of the stimulated CD4/CD56 depleted PBMC was performed as follows: Coating of a Petri dish (145 mm diameter, Greiner bio-one GmbH, Kremsmünster) was carried out with a commercially available anti-CD3 specific antibody (e.g. OKT3, Othoclone) in a final concentration of 1 μg/ml for 1 hour at 37° C. Unbound protein was removed by one washing step with PBS. The fresh PBMC were isolated from peripheral blood (30-50 ml human blood) by Ficoll gradient centrifugation according to standard protocols. 3-5×10⁷ PBMC were added to the precoated petri dish in I2C ml of RPMI 1640 with stabilized glutamine/10% FCS/IL-2 20 U/ml (Proleukin, Chiron) and stimulated for 2 days. On the third day the cells were collected and washed once with RPMI 1640. IL-2 was added to a final concentration of 20 U/ml and the cells were cultivated again for one day in the same cell culture medium as above. By depletion of CD4+ T cells and CD56+ NK cells according to standard protocols CD8+ cytotoxic T lymphocytes (CTLs) were enriched.

[0420] Target cells were washed twice with PBS and labelled with 11.1 MBq ⁵¹Cr in a final volume of 100 μl RPMI with 50% FCS for 45 minutes at 37° C. Subsequently the labelled target cells were washed 3 times with 5 ml RPMI and then used in the cytotoxicity assay. The assay was performed in a 96 well plate in a total volume of 250 μl supplemented RPMI (as above) with an E:T ratio 10:1. 1 μg/ml of the cross-species specific bispecific single chain antibody molecules and 20 threefold dilutions thereof were applied. If using supernatant containing the cross-species specific bispecific single chain antibody molecules, 21 two- and 20 threefold dilutions thereof were applied for the macaque and the human cytotoxicity assay, respectively. The assay time was 18 hours and cytotoxicity was measured as relative values of released chromium in the supernatant related to the difference of maximum lysis (addition of Triton-X) and spontaneous lysis (without effector cells). All measurements were done in quadruplicates. Measurement of chromium activity in the supernatants was performed with a Wizard 3″ gamma counter (Perkin Elmer Life Sciences GmbH, Köln, Germany). Analysis of the experimental data was performed with Prism 4 for Windows (version 4.02, GraphPad Software Inc., San Diego, Calif., USA). Sigmoidal dose response curves typically have R² values >0.90 as determined by the software. EC₅₀ values calculated by the analysis program were used for comparison of bioactivity.

[0421] As shown in FIGS. 13 to 17 and 40, all of the generated cross-species specific bispecific single chain antibody constructs demonstrate cytotoxic activity against human MCSP D3 positive target cells elicited by stimulated human CD4/CD56 depleted PBMC or stimulated PBMC and against macaque MCSP D3 positive target cells elicited by the macaque T cell line 4119LnPx.

### 12. Plasma Stability of MCSP and CD3 Cross-Species Specific Bispecific Single Chain Antibodies

[0422] Stability of the generated bispecific single chain antibodies in human plasma was analyzed by incubation of the bispecific single chain antibodies in 50% human Plasma at 37° C. and 4° C. for 24 hours and subsequent testing of bioactivity. Bioactivity was studied in a chromium 51 (⁵¹Cr) release in vitro cytotoxicity assay using a MCSP positive CHO cell line (expressing MCSP as cloned according to example 14 or 15) as target and stimulated human CD8 positive T cells as effector cells.

[0423] EC₅₀ values calculated by the analysis program as described above were used for comparison of bioactivity of bispecific single chain antibodies incubated with 50% human plasma for 24 hours at 37° C. and 4° C. respectively with bispecific single chain antibodies without addition of plasma or mixed with the same amount of plasma immediately prior to the assay.

[0424] As shown in FIG. 18 and Table 2 the bioactivity of the G4 H-L×I2C H-L, G4 H-L×H2C H-L and G4 H-L×F12Q H-L bispecific antibodies was not significantly reduced as compared with the controls without the addition of plasma or with addition of plasma immediately before testing of bioactivity.

TABLE 2
bioactivity of the bispecific antibodies
without or with the addition of Plasma

| | Without | With | Plasma | Plasma |
|---|---|---|---|---|
| Construct | plasma | plasma | 37° C. | 4° C. |
| G4 H-L × I2C H-L | 300 | 796 | 902 | 867 |
| G4 H-L × H2C H-L | 496 | 575 | 2363 | 1449 |
| G4 H-L × F12Q H-L | 493 | 358 | 1521 | 1040 |

13. Redistribution of Circulating T Cells in the Absence of Circulating Target Cells by First Exposure to CD3 Binding Molecules Directed at Conventional i.e. Context Dependent CD3 Epitopes is a Major Risk Factor for Adverse Events Related to the Initiation of Treatment
T Cell Redistribution in Patients with B-Cell Non-Hodgkin-Lymphoma (B-NHL) Following Initiation of Treatment with the Conventional CD3 Binding Molecule

[0425] A conventional CD19×CD3 binding molecules is a CD3 binding molecule of the bispecific tandem scFv format (Loffler (2000, Blood, Volume 95, Number 6) or WO 99/54440). It consists of two different binding portions directed at (i) CD19 on the surface of normal and malignant human B cells and (ii) CD3 on human T cells. By crosslinking CD3 on T cells with CD19 on B cells, this construct triggers the redirected lysis of normal and malignant B cells by the cytotoxic activity of T cells. The CD3 epitope recognized by such a conventional CD3 binding molecule is localized on the CD3 epsilon chain, where it only takes the correct conformation if it is embedded within the rest of the epsilon chain and held in the right position by heterodimerization of the epsilon chain with either the CD3 gamma or delta chain. Interaction of this highly context dependent epitope with a conventional CD3 binding molecule (see e.g. Loffler (2000, Blood, Volume 95, Number 6) or WO 99/54440)—even when it occurs in a purely monovalent fashion and without any crosslinking—can induce an allosteric change in the conformation of CD3 leading to the exposure of an otherwise hidden proline-rich region within the cytoplasmic domain of CD3 epsilon. Once exposed, the proline-rich region can recruit the signal transduction molecule Nck2, which is capable of triggering further intracellular signals. Although this is not sufficient for full T cell activation, which definitely requires crosslinking of several CD3 molecules on the T cell surface, e.g. by crosslinking of several anti-CD3 molecules bound to several CD3 molecules on a T cell by several CD19 molecules on the surface of a B cell, pure monovalent interaction of conventional CD3 binding molecules to their context dependent epitope on CD3 epsilon is still not inert for T cells in terms of signalling. Without being bound by theory, monovalent conventional CD3 binding molecules (known in the art) may induce some T cell reactions when infused into humans even in those cases where no circulating target cells are available for CD3 crosslin king. An important T cell reaction to the intravenous infusion of monovalent conventional CD19×CD3 binding molecule into B-NHL patients who have essentially no circulating CD19-positive B cells is the redistribution of T cells after start of treatment. It has been found in a phase I clinical trial that this T cell reaction occurs during the starting phase of intravenous CD19×CD3 binding molecule infusion in all individuals without circulating CD19-positive target B cells essentially independent of the CD19×CD3 binding molecule dose (FIG. 19). However, sudden increases in CD19×CD3 binding molecule exposure have been found to trigger virtually the same redistributional T cell reaction in these patients as the initial exposure of T cells to CD19×CD3 binding molecule at treatment start (FIG. 20 A) and even gradual increases in CD19×CD3 binding molecule exposure still can have redistributional effects on circulating T cells (FIG. 21). Moreover, it has been found that this essentially dose-independent redistributional T cell reaction in the absence of circulating target cells as triggered by conventional CD3 binding molecules like the CD19×CD3 binding molecule (e.g. disclosed in WO 99/54440) in 100% of all treated individuals is a major risk factor for adverse events related to the initiation of treatment.

[0426] According to the study protocol, patients with relapsed histologically confirmed indolent B-cell Non-Hodgkin-Lymphoma (B-NHL) including mantle cell lymphoma were recruited in an open-label, multi-center phase I interpatient dose-escalation trial. The study protocol was approved by the independent ethics committees of all participating centers and sent for notification to the responsible regulatory authority. Measurable disease (at least one lesion≧1.5 cm) as documented by CT scan was required for inclusion into the study. Patients received conventional CD19×CD3 binding molecule by continuous intravenous infusion with a portable minipump system over four weeks at constant flow rate (i.e. dose level). Patients were hospitalized during the first two weeks of treatment before they were released from the hospital and continued treatment at home. Patients without evidence of disease progression after four weeks were offered to continue treatment for further four weeks. So far six different dose levels were tested without reaching a maximum tolerated dose (MTD): 0.5, 1.5, 5, 15, 30 and 60 μg/m²/24 h. Cohorts consisted of three patients each if no adverse events defined by the study protocol as DLT (dose limiting toxicity) were observed. In case of one DLT among the first three patients the cohort was expanded to six patients, which—in the absence of a second DLT—allowed further dose escalation. Accordingly, dose levels without DLT in cohorts with 3 patients or with one DLT in cohorts with 6 patients were regarded as safe. Study treatment was stopped in all patients who developed a DLT. At 15 and 30 μg/m²/24 h different modes of treatment initiation during the first 24 h were tested in several additional cohorts: (i) Stepwise increase after 5 μg/m²/24 h for the first 24 h to 15 μg/m²/24 h maintenance dose (patient cohort 15-step), (ii) even continuous increase of flow-rate from almost zero to 15 or 30 μg/m²/24 h (patient cohorts 15-ramp and 30-ramp) and (iii) start with the maintenance dose from the very beginning (patient cohorts 15-flat, 30-flat and 60-flat). Patient cohorts at dose levels 0.5, 1.5 and 5 μg/m²/24 h were all started with the maintenance dose from the very beginning (i.e. flat initiation).

[0427] Time courses of absolute B- and T-cell counts in peripheral blood were determined by four color FACS analysis as follows:

### Collection of Blood Samples and Routine Analysis

[0428] In patient cohorts 15-ramp, 15-flat, 30-ramp, 30-flat and 60-flat blood samples (6 ml) were obtained before and 0.75, 2, 6, 12, 24, 30, 48 hours after start of CD19×CD3 binding molecule (as disclosed in WO 99/54440) infusion as well as on treatment days 8, 15, 17, 22, 24, 29, 36, 43, 50, 57 and 4 weeks after end of conventional CD19×CD3 binding molecule infusion using EDTA-containing Vacutainer™ tubes (Becton Dickinson) which were shipped for analysis at 4° C. In patient cohorts 15-step blood samples (6 ml) were obtained before and 6, 24, 30, 48 hours after start of CD19×CD3 binding molecule infusion as well as on treatment days 8, 15, 22, 29, 36, 43, 50, 57 and 4 weeks after end of CD19×CD3 binding molecule infusion. At dose levels 0.5, 1.5 and 5 μg/m²/24 h blood samples (6 ml) were obtained before and 6, 24, 48 hours after start of CD19×CD3 binding molecule infusion as well as on treatment days 8, 15, 22, 29, 36, 43, 50, 57 and 4 weeks after end of CD19×CD3 binding molecule infusion. In some cases slight variations of these time points occurred for operational reasons. FACS analysis of lymphocyte subpopulations was performed within 24-48 h after blood sample collection. Absolute numbers of leukocyte subpopulations in the blood samples were determined through differential blood analysis on a CoulterCounter™ (Coulter).

Isolation of PBMC from Blood Samples

[0429] PBMC (peripheral blood mononuclear cells) isolation was performed by an adapted Ficoll™ gradient separation protocol. Blood was transferred at room temperature into 10 ml Leucosep™ tubes (Greiner) pre-loaded with 3 ml Biocoll™ solution (Biochrom). Centrifugation was carried out in a swing-out rotor for 15 min at 1700×g and 22° C. without deceleration. The PBMC above the Biocoll™ layer were isolated, washed once with FACS buffer (PBS/2% FBS [Foetal Bovine Serum; Biochrom]), centrifuged and resuspended in FACS buffer. Centrifugation during all wash steps was carried out in a swing-out rotor for 4 min at 800×g and 4° C. If necessary, lysis of erythrocytes was performed by incubating the isolated PBMC in 3 ml erythrocyte lysis buffer (8.29 g NH₄Cl, 1.00 g KHCO₃, 0.037 g EDTA, ad 1.0 l H₂O_{bidest}, pH 7.5) for 5 min at room temperature followed by a washing step with FACS buffer.

Staining of PBMC with Fluorescence-Labeled Antibodies Against Cell Surface Molecules

[0430] Monoclonal antibodies were obtained from Invitrogen (¹Cat. No. MHCD1301, ²Cat. No. MHCD1401), Dako (⁵Cat. No. C7224) or Becton Dickinson (³Cat. No. 555516, ⁴Cat. No. 345766) used according to the manufacturers' recommendations. 5×10⁵-1×10⁶ cells were stained with the following antibody combination: anti-CD13¹/anti-CD14² (FITC)×anti-CD56³ (PE)×anti-CD3⁴ (PerCP)×anti-CD19⁵ (APC). Cells were pelleted in V-shaped 96 well multititer plates (Greiner) and the supernatant was removed. Cell pellets were resuspended in a total volume of 100 μl containing the specific antibodies diluted in FACS buffer. Incubation was carried out in the dark for 30 min at 4° C. Subsequently, samples were washed twice with FACS buffer and cell pellets were resuspended in FACS buffer for flowcytometric analysis.

### Flowcytometric Detection of Stained Lymphocytes by FACS

[0431] Data collection was performed with a 4 color BD FACSCalibur™ (Becton Dickinson). For each measurement 1×10⁴ cells of defined lymphocyte subpopulations were acquired. Statistical analysis was performed with the program CellQuest Pro™ (Becton Dickinson) to obtain lymphocyte subpopulation percentages and to classify cell surface molecule expression intensity. Subsequently, percentages of single lymphocyte subsets related to total lymphocytes (i.e. B plus T plus NK cells excluding any myeloid cells via CD13/14-staining) as determined by FACS were correlated with the lymphocyte count from the differential blood analysis to calculate absolute cell numbers of T cells (CD3⁺, CD56⁻, CD13/14⁻) and B cells (CD19⁺, CD13/14⁻).

[0432] T cell redistribution during the starting phase of conventional CD19×CD3 binding molecule (e.g. disclosed in WO 99/54440) treatment in all those patients who had essentially no circulating CD19-positive B cells at treatment start is shown in (FIG. 19). For comparison, a representative example of T cell redistribution during the starting phase of CD19×CD3 binding molecule treatment in a patient with a significant number of circulating CD19-positive B cells is shown in FIG. 22.

[0433] In both cases (i.e. essentially no or many circulating B cells) circulating T cell counts rapidly decrease upon treatment start. However, in the absence of circulating B cells T cells tend to return into the circulating blood very early, while the return of T cells into the circulating blood of those patients who have a significant number of circulating B cells at treatment start is usually delayed until these circulating B cells are depleted. Thus, the T cell redistribution patterns mainly differ in the kinetics of T cell reappearance in the circulating blood.

[0434] Assessment of efficacy based on CT scan was carried out by central reference radiology after 4 weeks of treatment and in patients receiving additional 4 weeks also after 8 weeks of treatment plus in all cases four weeks after end of treatment. Disappearance and/or normalization in size of all known lesions (including an enlarged spleen) plus clearance of bone marrow from lymphoma cells in cases of bone marrow infiltration was counted as complete response (CR). Reduction by at least 50% from baseline of the sum of products of the two biggest diameters (SPD) of each predefined target lesion was defined as partial response (PR); a reduction by at least 25% was regarded a minimal response (MR). Progressive disease (PD) was defined as ≧50% increase of SPD from baseline. SPD deviations from baseline between +50% and −25% were regarded as stable disease (SD).

[0435] Patient demographics, doses received and clinical outcome in 34 patients are summarized in Table 3. Clinical anti-tumor activity of the CD19×CD3 binding molecule was clearly dose dependent: Consistent depletion of circulating CD19-positive B (lymphoma) cell from peripheral blood was observed from 5 μg/m²/24 h onwards. At 15 μg/m²/24 h and 30 μg/m²/24 h first objective clinical responses (PRs and CRs) were recorded as well as cases of partial and complete elimination of B lymphoma cells from infiltrated bone marrow. Finally, at 60 μg/m²/24 h the response rate increased to 100% (PRs and CRs) and bone marrow clearance from B lymphoma cells was complete in all evaluable cases.

[0436] The CD19×CD3 binding molecule was well tolerated by the majority of patients. Most frequent adverse events of grades 1-4 in 34 patients, regardless of causality are summarized in Table 4. CD19×CD3 binding molecule-related adverse events usually were transient and fully reversible. In particular, there were 2 patients (patients # 19 and # 24 in Table 3) essentially without circulating CD19-positive B cells whose treatment was stopped early because of CNS adverse events (lead symptoms: confusion and disorientation) related to repeated T cell redistribution during the starting phase of CD19×CD3 binding molecule infusion.

[0437] One of these patients (#19) was in cohort 15-step. He received 5 μg/m²/24 h CD19×CD3 binding molecule for the first 24 h followed by sudden increase to 15 μg/m²/24 h maintenance dose. The corresponding T cell redistribution pattern shows that circulating T cell counts rapidly decreased upon start of infusion at 5 μg/m²/24 h followed by early reappearance of T cells in the circulating blood essentially without circulating CD19-positive B cells. As a consequence, the peripheral T cell counts had fully recovered when the CD19×CD3 binding molecule dose was increased after 24 h from 5 to 15 μg/m²/24 h. Therefore the dose step could trigger a second episode of T cell redistribution as shown in FIG. 20 A. This repeated T cell redistribution was related with CNS side effects (lead symptoms: confusion and disorientation) in this patient, which led to the stop of infusion. The relationship between repeated T cell redistribution and such CNS adverse events was also observed in previous phase I clinical trials in B-NHL patients who received CD19×CD3 binding molecule (e.g. disclosed in WO 99/54440) as repeated bolus infusion for 2 to 4 hours each usually followed by 2 days of treatment free interval (FIG. 20 B). Every single bolus infusion triggered one episode of T cell redistribution consisting of a fast decrease in circulating T cell counts and T cell recovery prior to the next bolus infusion. In total, CNS adverse events related to repeated T cell redistribution were observed in 5 out of 21 patients. FIG. 20 B shows the representative example of one patient from the bolus infusion trials, who developed CNS symptoms after the third episode of T cell redistribution. Typically, patients with CNS adverse events in the bolus infusion trials also had low circulating B cell counts.

[0438] The second patient (#24) from the continuous infusion trial, whose treatment was stopped early because of CNS adverse events (lead symptoms: confusion and disorientation) related to repeated T cell redistribution during the starting phase of CD19×CD3 binding molecule infusion, was in cohort 15-flat. By mistake, this patient received an CD19×CD3 binding molecule infusion without additional HSA as required for stabilization of the drug. The resulting uneven drug flow triggered repeated episodes of T cell redistribution instead of only one (FIG. 23 A) with the consequence that the infusion had to be stopped because of developing CNS symptoms. Yet, when the same patient was restarted correctly with CD19×CD3 binding molecule solution containing additional HSA for drug stabilization (e.g. disclosed in WO 99/54440), no repeated T cell redistribution was observed and the patient did not again develop any CNS symptoms (FIG. 23 B). Because this patient also had essentially no circulating B cells, the circulating T cells could react with fast redistribution kinetics even to subtle changes in drug exposure as observed. The CNS adverse events related to T cell redistribution in patients who have essentially no circulating target cells can be explained by a transient increase of T cell adhesiveness to the endothelial cells followed by massive simultaneous adhesion of circulating T cells to the blood vessel walls with a consecutive drop of T cell numbers in the circulating blood as observed. The massive simultaneous attachment of T cells to the blood vessel walls can cause an increase in endothelial permeability and endothelial cell activation. The consequences of increased endothelial permeability are fluid shifts from the intravascular compartment into interstitial tissue compartments including the CNS interstitium. Endothelial cell activation by attached T cells can have procoagulatory effects (Monaco et al. J Leukoc Biol 71 (2002) 659-668) with possible disturbances in blood flow (including cerebral blood flow) particularly with regard to capillary microcirculation. Thus, CNS adverse events related to T cell redistribution in patients essentially without circulating target cells can be the consequence of capillary leak and/or disturbances in capillary microcirculation through adherence of T cells to endothelial cells. The endothelial stress caused by one episode of T cell redistribution is tolerated by the majority of patients, while the enhanced endothelial stress caused by repeated T cell redistribution frequently causes CNS adverse events. More than one episode of T cell redistribution may be less risky only in patients who have low baseline counts of circulating T cells. However, also the limited endothelial stress caused by one episode of T cell redistribution can cause CNS adverse events in rare cases of increased susceptibility for such events as observed in 1 out of 21 patients in the bolus infusion trials with the CD19×CD3 binding molecule.

[0439] Without being bound by theory, the transient increase of T cell adhesiveness to the endothelial cells in patients who have essentially no circulating target cells can be explained as T cell reaction to the monovalent interaction of a conventional CD3 binding molecule, like the CD19×CD3 binding molecule (e.g. WO 99/54440), to its context dependent epitope on CD3 epsilon resulting in an allosteric change in the conformation of CD3 followed by the recruitment of Nck2 to the cytoplasmic domain of CD3 epsilon as described above. As Nck2 is directly linked to integrins via PINCH and ILK (FIG. 28), recruitment of Nck2 to the cytoplasmic domain of CD3 epsilon following an allosteric change in the conformation of CD3 through binding of a conventional CD3 binding molecule, like the CD19×CD3 binding molecule, to its context dependent epitope on CD3 epsilon, can increase the adhesiveness of T cells to endothelial cells by transiently switching integrins on the T cell surface into their more adhesive isoform via inside-out-signalling.

TABLE 3
Patient demographics and clinical outcome

| | | | | Dose | | Best |
|---|---|---|---|---|---|---|
| | | | | Level | Clearance | Response* |
| | | | Disease | [mg/ | of | (CR Duration |
| Co- | Pa- | Age/ | (Ann Arbor | m²/ | Bone | in Months or |
| hort | tient | Sex | Classification) | Day] | Marrow | Weeks) |
| 1 | 1 | 71/m | IC, Binet C | 0.0005 | None | SD |
| | 2 | 67/f | MCL, Stage | 0.0005 | n.d. | PD |
| | | | IV/A/E | | | |
| | 3 | 67/m | CLL, Stage | 0.0005 | n.d. | MR |
| | | | IV/B/E | | | |
| 2 | 4 | 69/m | MCL, Stage | 0.0015 | n.i. | SD |
| | | | IV/B | | | |
| | 5 | 49/m | MCL, Stage | 0.0015 | n.d. | SD |
| | | | IV/A/S | | | |
| | 6 | 71/m | MCL, Stage | 0.0015 | n.i. | PD |
| | | | IV/B/E | | | |
| | 7 | 77/m | MCL, Stage | 0.0015 | n.i. | SD |
| | | | IV/B/E/S | | | |
| | 8 | 65/m | CLL, Stage | 0.0015 | n.d. | PD |
| | | | IV/B/E/S | | | |
| | 9 | 75/m | FL, Stage II/B | 0.0015 | n.i. | SD |
| 3 | 10 | 58/m | MCL, Stage | 0.005 | n.i. | PD |
| | | | III/B/S | | | |
| | 11 | 68/f | FL, Stage IV/B | 0.005 | n.d. | SD |
| | 12 | 65/m | MCL, Stage | 0.005 | n.i. | SD |
| | | | III/A/E | | | |
| 4^{a} | 13 | 60/m | SLL, Stage | 0.015 | Complete | PR |
| | | | IV/B/S | | | |
| | 14 | 73/m | MCL, Stage | 0.015 | n.i. | SD |
| | | | II/A/E | | | |
| | 15 | 44/m | FL, Stage | 0.015 | Partial | PR |
| | | | IV/B/E/S | | | |
| | 16 | 61/m | FL, Stage | 0.015 | Complete | CR (7 mo) |
| | | | IV/A/S | | | |
| | 17 | 67/m | MZL, Stage | 0.015 | n.i. | n.e. |
| | | | IV/B/S | | | |
| | 18 | 64/m | FL, Stage | 0.015 | n.i. | PD |
| | | | IV/A/E | | | |
| | 19 | 75/m | MCL, Stage | 0.015 | n.i. | n.e. |
| | | | III/A | | | |
| | 20 | 65/f | FL; Stage III/A | 0.015 | n.i. | SD |
| | 21 | 60/m | MCL, Stage | 0.015 | None | SD |
| | | | IV/A/E | | | |
| | 22 | 67/f | FL, Stage IV/B | 0.015 | Complete | MR |
| | 23 | 67/m | DLBCL, Stage | 0.015 | n.i. | n.e. |
| | | | III/B | | | |
| | 24 | 65/f | FL, Stage III/A | 0.015 | n.d. | SD |
| | 25 | 74/f | WD, Stage IV/B | 0.015 | Partial | SD |
| 5 | 26 | 67/m | MCL, Stage | 0.03 | Complete | SD |
| | | | IV/A | | | |
| | 27 | 48/m | FL, Stage III/A | 0.03 | n.i. | PD |
| | 28 | 58/m | MCL, Stage | 0.03 | n.i. | CR (10 mo+) |
| | | | III/A | | | |
| | 29 | 45/f | MCL, Stage | 0.03 | Partial | PD |
| | | | IV/B | | | |
| | 30 | 59/m | MZL, Stage | 0.03 | n.i. | n.e. |
| | | | III/A | | | |
| | 31 | 43/m | FL, Stage III/A | 0.03 | n.i. | MR |
| 6 | 32 | 72/m | MCL, Stage | 0.06 | Complete | PR |
| | | | IV/A | | | |
| | 33 | 55/m | MCL, Stage | 0.06 | Complete | CR (4 mo+) |
| | | | IV/B | | | |
| | 34 | 52/m | FL, Stage IV/A | 0.06 | n.i. | CR^{b} (1 w+) |

*Centrally confirmed complete (CR) and partial (PR) responses by Cheson criteria in bold; MR, minimal response (≧25 to <50%);
SD, stable disease;
PD, progressive disease; duration from first documentation of response in parentheses;
+ denotes an ongoing response
^{a}Cohort 4 was expanded to study three different schedules of treatment initiation
^{b}PR after 8 weeks of treatment that turned into a CR after an additional treatment cycle of 4 weeks at the same dose following 7 weeks of treatment free interval
n.e.: not evaluable, because of treatment period <7 d
n.d.: not determined (infiltrated, but no second biopsy performed at end of treatment)
n.i.: not infiltrated at start of treatment

TABLE 4
Incidence of adverse events observed during treatment

| Adverse events regardless of | | | | |
|---|---|---|---|---|
| relationship, occuring in ≧3 patients | Grade 1-4 | | Grade 3-4 | |
| (N = 34) | N (%) | | N (%) | |
| Pyrexia | 22 | (64.7) | 2 | (5.9) |
| Leukopenia | 21 | (61.8) | 11 | (32.4) |
| Lymphopenia | 21 | (61.8) | 21 | (61.8) |
| Coagulopathy (increase in D-dimers) | 16 | (47.1) | 6 | (17.6) |
| Enzyme abnormality (AP, LDH, CRP) | 16 | (47.1) | 10 | (29.4) |
| Hepatic function abnormality | 16 | (47.1) | 1 | (2.9) |
| (ALT, AST, GGT) | | | | |
| Anaemia | 13 | (38.2) | 5 | (14.7) |
| Chills | 13 | (38.2) | 0 | (0.0) |
| Headache | 12 | (35.3) | 1 | (2.9) |
| Hypokalaemia | 12 | (35.3) | 2 | (5.9) |
| Thrombocytopenia | 12 | (35.3) | 6 | (17.6) |
| Weight increased | 12 | (35.3) | 0 | (0.0) |
| Hyperglycaemia | 11 | (32.4) | 2 | (5.9) |
| Neutropenia | 11 | (32.4) | 8 | (23.5) |
| Haematuria | 10 | (29.4) | 0 | (0.0) |
| Oedema peripheral | 10 | (29.4) | 2 | (5.9) |
| Anorexia | 9 | (26.5) | 1 | (2.9) |
| Diarrhoea | 9 | (26.5) | 0 | (0.0) |
| Weight decreased | 9 | (26.5) | 0 | (0.0) |
| Fatigue | 8 | (23.5) | 1 | (2.9) |
| Proteinuria | 8 | (23.5) | 0 | (0.0) |
| Hypocalcaemia | 7 | (20.6) | 2 | (5.9) |
| Pancreatic enzyme abnormality | 7 | (20.6) | 0 | (0.0) |
| Cough | 6 | (17.6) | 0 | (0.0) |
| Dyspnoea | 6 | (17.6) | 0 | (0.0) |
| Back pain | 5 | (14.7) | 0 | (0.0) |
| Catheter site pain | 5 | (14.7) | 0 | (0.0) |
| Hyperbilirubinaemia | 5 | (14.7) | 2 | (5.9) |
| Hypoalbuminaemia | 5 | (14.7) | 0 | (0.0) |
| Hypogammaglobulinaemia | 5 | (14.7) | 1 | (2.9) |
| Hypoproteinaemia | 5 | (14.7) | 0 | (0.0) |
| Pleural effusion | 5 | (14.7) | 1 | (2.9) |
| Vomiting | 5 | (14.7) | 0 | (0.0) |
| Asthenia | 4 | (11.8) | 1 | (2.9) |
| Confusional state | 4 | (11.8) | 0 | (0.0) |
| Constipation | 4 | (11.8) | 0 | (0.0) |
| Dizziness | 4 | (11.8) | 0 | (0.0) |
| Hypertension | 4 | (11.8) | 0 | (0.0) |
| Hyponatraemia | 4 | (11.8) | 2 | (5.9) |
| Mucosal dryness | 4 | (11.8) | 0 | (0.0) |
| Muscle spasms | 4 | (11.8) | 0 | (0.0) |
| Nausea | 4 | (11.8) | 0 | (0.0) |
| Night sweats | 4 | (11.8) | 0 | (0.0) |
| Abdominal pain | 3 | (8.8) | 1 | (2.9) |
| Ascites | 3 | (8.8) | 0 | (0.0) |
| Hypercoagulation | 3 | (8.8) | 0 | (0.0) |
| Hyperhidrosis | 3 | (8.8) | 0 | (0.0) |
| Hypoglobulinaemia | 3 | (8.8) | 0 | (0.0) |
| Insomnia | 3 | (8.8) | 0 | (0.0) |
| Liver disorder | 3 | (8.8) | 1 | (2.9) |
| Nasopharyngitis | 3 | (8.8) | 0 | (0.0) |
| Pruritus | 3 | (8.8) | 0 | (0.0) |

Abbreviations used are: AE, adverse event; AP, alkaline phosphatase; LDH, lactate dehydrogenase; CRP, C-reactive protein; ALT, alanine transaminase; AST, aspartate transaminase; GGT, gamma-glutamyl transferase; AE data from the additional treatment cycle of patient 34 not yet included.

[0440] As explained above, conventional CD3 binding molecules (e.g. disclosed in WO 99/54440) capable of binding to a context-dependent epitope, though functional, lead to the undesired effect of T cell redistribution in patients causing CNS adverse events. In contrast, binding molecules of the present invention, by binding to the context-independent N-terminal 1-27 amino acids of the CD3 epsilon chain, do not lead to such T cell redistribution effects. As a consequence, the CD3 binding molecules of the invention are associated with a better safety profile compared to conventional CD3 binding molecules.

### 14. Bispecific CD3 Binding Molecules of the Invention Inducing T Cell Mediated Target Cell Lysis by Recognizing a Surface Target Antigen Deplete Target Antigen Positive Cells In Vivo

[0441] A Bispecific CD3 Binding Molecule of the Invention Recognizing CD33 as Target Antigen Depletes CD33-Positive Circulating Monocytes from the Peripheral Blood of Cynomolgus Monkeys

[0442] CD33-AF5 VH-VL×I2C VH-VL (amino acid sequence: SEQ ID NO.267) was produced by expression in CHO cells using the coding nucleotide sequence SEQ ID NO. 268. The coding sequences of (i) an N-terminal immunoglobulin heavy chain leader comprising a start codon embedded within a Kozak consensus sequence and (ii) a C-terminal His₆-tag followed by a stop codon were both attached in frame to the nucleotide sequence SEQ ID NO 268 prior to insertion of the resulting DNA-fragment as obtained by gene synthesis into the multiple cloning site of the expression vector pEF-DHFR (Raum et al. Cancer Immunol Immunother 50 (2001) 141-150). Stable transfection of DHFR-deficient CHO cells, selection for DHFR-positive transfectants secreting the CD3 binding molecule CD33-AF5 VH-VL×I2C VH-VL into the culture supernatant and gene amplification with methotrexat for increasing expression levels were carried out as described (Mack et al. Proc. Natl. Acad. Sci. USA 92 (1995) 7021-7025). The analytical SEC-profile of CD33-AF5 VH-VL×I2C VH-VL for use in cynomolgus monkeys revealed that the test material almost exclusively consisted of monomer. The potency of the test material was measured in a cytotoxicity assay as described in example 16.5 using CHO cells transfected with cynomolgus CD33 as target cells and the macaque T cell line 4119LnPx as source of effector cells (FIG. 25). The concentration of CD33-AF5 VH-VL×I2C VH-VL required for half-maximal target cell lysis by the effector T cells (EC50) was determined to be 2.7 ng/ml.

[0443] Young (approx. 3 years old) adult cynomolgus monkeys (Macaca fascicularis) were treated by continuous intravenous infusion of CD3 binding molecule CD33-AF5 VH-VL×I2C VH-VL at different flow-rates (i.e. dose levels) to study depletion of circulating CD33-positive monocytes from the peripheral blood. This situation is equivalent to the treatment with the conventional CD3 binding molecule CD19×CD3 (specific for CD19 on B cells and CD3 on T cells) of those B-NHL patients, who have circulating CD19-positive target B cells (see e.g. WO99/54440). Depletion of circulating CD19-positive target B cells from the peripheral blood had turned out as a valid surrogate for the general clinical efficacy of the conventional CD3 binding molecule (CD19×CD3 as provided in WO99/54440) in patients with CD19-positive B-cell malignomas like B-NHL. Likewise, depletion of circulating CD33-positive monocytes from the peripheral blood is regarded as a valid surrogate of the general clinical efficacy of CD33-directed bispecific CD3 binding molecules of the invention like CD33-AF5 VH-VL×I2C VH-VL in patients with CD33-positive myeloid malignomas like AML (acute myeloid leukemia).

[0444] Continuous infusion was carried out according to the Swivel method as follows: The monkeys are catheterized via the vena femoralis into the vena cava caudalis using a vein catheter. The catheter is tunneled subcutaneously to the dorsal shoulder region and exteriorized at the caudal scapula. Then a tube is passed through a jacket and a protection spring. The jacket is fastened around the animal and the catheter, via the tube, is connected to an infusion pump.

[0445] Administration solution (1.25 M lysine, 0.1% tween 80, pH 7) without test material was infused continuously at 48 ml/24 h for 7 days prior to treatment start to allow acclimatization of the animals to the infusion conditions. Treatment was started by adding CD33-AF5 VH-VL×I2C VH-VL test material to the administration solution at the amount required for each individual dose level to be tested (i.e. flow rate of CD33-AF5 VH-VL×I2C VH-VL). The infusion reservoir was changed every day throughout the whole acclimatization and treatment phase. Planned treatment duration was 7 days except for the I2C μg/m²/24 h dose level, where animals received 14 days of treatment.

[0446] Time courses of absolute counts in circulating T cells and CD33-positive monocytes were determined by 4- or 3-colour FACS analysis, respectively:

### Collection of Blood Samples and Routine Analysis

[0447] Blood samples (1 ml) were obtained before and 0.75, 2, 6, 12, 24, 30, 48, 72 hours after start of continuous infusion with MCSP-G4 VH-VL×I2C VH-VL as well as after 7 and 14 days (and after 9 days at the I2C μg/m²/24 h dose level) of treatment using EDTA-containing Vacutainer™ tubes (Becton Dickinson) which were shipped for analysis at 4° C. In some cases slight variations of these time points occurred for operational reasons. FACS analysis of lymphocyte subpopulations was performed within 24-48 h after blood sample collection. Absolute numbers of leukocyte subpopulations in the blood samples were determined through differential blood analysis in a routine veterinary lab.

Isolation of PBMC from Blood Samples

[0448] PBMC (peripheral blood mononuclear cells) were isolated in analogy to the protocol described in example 13, above, with adaptations of the used volumes.

Staining of PBMC with Fluorescence-Labeled Antibodies Against Cell Surface Molecules

[0449] Monoclonal antibodies reactive with cynomolgus antigens were obtained from Becton Dickinson (¹Cat. No. 345784, ²Cat. No. 556647, ³Cat. No. 552851, ⁶Cat. No. 557710), Beckman Coulter (⁴Cat. No. IM2470) and Miltenyi (⁶Cat. No. 130-091-732) and used according to the manufacturers' recommendations. 5×10⁵-1×10⁶ cells were stained with the following antibody combinations: anti-CD14¹ (FITC)×anti-CD56² (PE)×anti-CD3³ (PerCP)×anti-CD19⁴ (APC) and anti-CD14¹ (FITC)×anti-CD33⁵ (PE)×anti-CD16⁶ (Alexa Fluor 647™). Additional steps were performed as described in example 13, above.

### Flowcytometric Detection of Stained Lymphocytes by FACS

[0450] Data collection was performed with a 4 color BD FACSCalibur™ (Becton Dickinson). For each measurement 1×10⁴ cells of defined lymphocyte subpopulations were acquired. Statistical analysis was performed with the program CellQuest Pro™ (Becton Dickinson) to obtain lymphocyte subpopulation percentages and to classify cell surface molecule expression intensity. Subsequently, percentages of single lymphocyte subsets related to total lymphocytes (i.e. B plus T plus NK cells excluding myeloid cells via CD14-staining) as determined by FACS were correlated with the lymphocyte count from the differential blood analysis to calculate absolute cell numbers of T cells (CD3⁺, CD56⁻, CD14⁻). Absolute numbers of CD33-positive monocytes were calculated by multiplying the monocyte counts from the differential blood analysis with the corresponding ratios of CD33-positive monocytes (CD33⁺, CD14⁺) to all monocytes (CD14⁺) as determined by FACS.

[0451] The percentage compared to baseline (i.e. 100%) of absolute circulating CD33-positive monocyte counts at the end of treatment with CD33-AF5 VH-VL×I2C VH-VL in 4 cohorts of 2 cynomolgus monkeys with inter-cohort dose escalation from 30 over 60 and 240 to 1000 μg/m²/24 h are shown in FIG. 26 A.

[0452] As shown in FIG. 26 A, continuous intravenous infusion of CD33-AF5 VH-VL×I2C VH-VL induces depletion of circulating CD33-positive monocytes in a dose-dependent manner. While there was still no detectable depletion of circulating CD33-positive monocytes at 30 μg/m²/24 h, a first trend towards a reduction of CD33-positive monocyte counts became visible at 60 μg/m²/24 h after 7 days of treatment. At 240 μg/m²/24 h circulating CD33-positive monocytes were almost completely depleted from the peripheral blood after 3 days of treatment. This was reached even faster at 1000 μg/m²/24 h, where depletion of the circulating CD33-positive monocytes from the peripheral blood was completed already after 1 day of treatment. This finding was confirmed by the results shown in FIG. 26 B demonstrating depletion of circulating CD33-positive monocytes by two thirds and 50% compared to the respective baseline in two cynomolgus monkeys treated by continuous infusion with CD33-AF5 VH-VL×I2C VH-VL at I2C μg/m²/24 h for 14 days.

[0453] This outcome is a clear signal clinical efficacy of the CD3 binding molecules of the invention in general and of bispecific CD33-directed CD3 binding molecules of the invention for the treatment of CD33-positive malignomas like AML in particularly. Moreover, the T cell redistribution during the starting phase of treatment with CD33-AF5 VH-VL×I2C VH-VL in the presence of circulating target cells (i.e. CD33-positive monocytes) seems to be less pronounced than T cell redistribution during the starting phase of treatment with conventional CD19×CD3 constructs, as described in WO99/54440 in B-NHL patients with a significant number of circulating target cells (i.e. CD19-positive B cells) as shown in FIG. 22. While T cells disappear completely from the circulation upon start of CD19×CD3 infusion and do not reappear until the circulating CD19-positive target B cells are depleted from the peripheral blood (FIG. 22), initial disappearance of circulating T cells is incomplete upon infusion start with CD33-AF5 VH-VL×I2C VH-VL and T cell counts recover still during the presence of circulating CD33-positive target cells (FIG. 26 B). This confirms that CD3 binding molecules of the invention (directed against and generated against an epitope of human and non-chimpanzee primates CD3c (epsilon) chain and being a part or fragment or the full length of the amino acid sequence as provided in SEQ ID Nos. 2, 4, 6, or 8) by recognizing a context-independent CD3 epitope show a more favorable T cell redistribution profile than conventional CD3 binding molecules recognizing a context-dependent CD3 epitope, like the binding molecules provided in WO99/54440.

### 15. CD3 Binding Molecules of the Invention Directed at Essentially Context Independent CD3 Epitopes by Inducing Less Redistribution of Circulating T Cells in the Absence of Circulating Target Cells Reduce the Risk of Adverse Events Related to the Initiation of Treatment

[0454] Reduced T Cell Redistribution in Cynomolgus Monkeys Following Initiation of Treatment with a Representative Cross-Species Specific CD3 Binding Molecule of the Invention

[0455] MCSP-G4 VH-VL×I2C VH-VL (amino acid sequence: SEQ ID NO. 193) was produced by expression in CHO cells using the coding nucleotide sequence SEQ ID NO. 194. The coding sequences of (i) an N-terminal immunoglobulin heavy chain leader comprising a start codon embedded within a Kozak consensus sequence and (ii) a C-terminal His6-tag followed by a stop codon were both attached in frame to the nucleotide sequence SEQ ID NO. 194 prior to insertion of the resulting DNA-fragment as obtained by gene synthesis into the multiple cloning site of the expression vector pEF-DHFR (Raum et al. Cancer Immunol Immunother 50 (2001) 141-150). Stable transfection of DHFR-deficient CHO cells, selection for DHFR-positive transfectants secreting the CD3 binding molecule MCSP-G4 VH-VL×I2C VH-VL into the culture supernatant and gene amplification with methotrexat for increasing expression levels were carried out as described (Mack et al. Proc. Natl. Acad. Sci. USA 92 (1995) 7021-7025). Test material for treatment of cynomolgus monkeys was produced in a 200-liter fermenter. Protein purification from the harvest was based on IMAC affinity chromatography targeting the C-terminal His6-tag of MCSP-G 4 V H-VL×I2C VH-VL followed by preparative size exclusion chromatography (SEC). The total yield of final endotoxin-free test material was 40 mg. The test material consisted of 70% monomer, 30% dimer and a small contamination of higher multimer. The potency of the test material was measured in a cytotoxicity assay as described in example 11 using CHO cells transfected with cynomolgus MCSP as target cells and the macaque T cell line 4119LnPx as source of effector cells (FIG. 27). The concentration of MCSP-G4 VH-VL×I2C VH-VL required for half-maximal target cell lysis by the effector T cells (EC50) was determined to be 1.9 ng/ml.

[0456] Young (approx. 3 years old) adult cynomolgus monkeys (Macaca fascicularis) were treated by continuous intravenous infusion of CD3 binding molecule MCSP-G4 VH-VL×I2C VH-VL at different flow-rates (i.e. dose levels) to study redistribution of circulating T cells following initiation of treatment in the absence of circulating target cells. Although the CD3 binding molecule MCSP-G4 VH-VL×I2C VH-VL can recognize both cynomolgus MCSP and cynomolgus CD3, there are no circulating blood cells expressing MCSP. Therefore, the only interaction possible in the circulating blood is binding of the CD3-specific arm of MCSP-G4 VH-VL×I2C VH-VL to CD3 on T cells. This situation is equivalent to the treatment with the conventional CD3 binding molecule (CD19×CD3 binding molecule specific for CD19 on B cells and CD3 on T cells) of those B-NHL patients, who have no circulating CD19-positive target B cells as described in example 13.

[0457] Continuous infusion was carried out according to the Swivel method as follows: The monkeys are catheterized via the vena femoralis into the vena cava caudalis using a vein catheter. The catheter is tunneled subcutaneously to the dorsal shoulder region and exteriorized at the caudal scapula. Then a tube is passed through a jacket and a protection spring. The jacket is fastened around the animal and the catheter, via the tube, is connected to an infusion pump.

[0458] Administration solution (1.25 M lysine, 0.1% tween 80, pH 7) without test material was infused continuously at 48 ml/24 h for 7 days prior to treatment start to allow acclimatization of the animals to the infusion conditions. Treatment was started by adding MCSP-G4 VH-VL×I2C VH-VL test material to the administration solution at the amount required for each individual dose level to be tested (i.e. flow rate of MCSP-G4 VH-VL×I2C VH-VL). The infusion reservoir was changed every day throughout the whole acclimatization and treatment phase. Treatment duration was 7 days.

[0459] Time courses of absolute T-cell counts in peripheral blood were determined by four color FACS analysis as follows:

### Collection of Blood Samples and Routine Analysis

[0460] Blood samples (1 ml) were obtained before and 0.75, 2, 6, 12, 24, 30, 48, 72 hours after start of continuous infusion with MCSP-G4 VH-VL×I2C VH-VL as well as after 7 days of treatment using EDTA-containing Vacutainer™ tubes (Becton Dickinson) which were shipped for analysis at 4° C. In some cases slight variations of these time points occurred for operational reasons. FACS analysis of lymphocyte subpopulations was performed within 24-48 h after blood sample collection. Absolute numbers of leukocyte subpopulations in the blood samples were determined through differential blood analysis in a routine veterinary lab.

Isolation of PBMC from Blood Samples

[0461] PBMC were isolated in analogy to the protocol described in example 13, above, with adaptations of the used volumes.

Staining of PBMC with Fluorescence-Labeled Antibodies Against Cell Surface Molecules

[0462] Monoclonal antibodies reactive with cynomolgus antigens were obtained from Becton Dickinson (¹Cat. No. 345784, ²Cat. No. 556647, ³Cat. No. 552851) and Beckman Coulter (⁴Cat. No. IM2470) used according to the manufacturers' recommendations. 5×10⁵-1×10⁶ cells were stained with the following antibody combination: anti-CD14¹ (FITC)×anti-CD56² (PE)×anti-CD3³ (PerCP)×anti-CD19⁴ (APC). Additional steps were performed as described in example 13, above.

### Flowcytometric Detection of Stained Lymphocytes by FACS

[0463] Data collection was performed with a 4 color BD FACSCalibur™ (Becton Dickinson). For each measurement 1×10⁴ cells of defined lymphocyte subpopulations were acquired. Statistical analysis was performed with the program CellQuest Pro™ (Becton Dickinson) to obtain lymphocyte subpopulation percentages and to classify cell surface molecule expression intensity. Subsequently, percentages of single lymphocyte subsets related to total lymphocytes (i.e. B plus T plus NK cells excluding myeloid cells via CD14-staining) as determined by FACS were correlated with the lymphocyte count from the differential blood analysis to calculate absolute cell numbers of T cells (CD3⁺, CD56⁻, CD14⁻).

[0464] T cell redistribution during the starting phase of treatment with MCSP-G4 VH-VL×I2C VH-VL in cynomolgus monkeys at dose levels of 60, 240 and 1000 μg/m²/24 h is shown in FIG. 28. These animals showed no signs at all of any T cell redistribution during the starting phase of treatment, i.e. T cell counts rather increased than decreased upon treatment initiation. Given that T cell redistribution is consistently observed in 100% of all patients without circulating target cells, upon treatment initiation with the conventional CD3 binding molecule (e.g. CD19×CD3 construct as described in WO 99/54440) against a context dependent CD3 epitope, it was demonstrated that substantially less T cell redistribution in the absence of circulating target cells upon treatment initiation can be observed with a CD3 binding molecule of the invention directed and generated against an epitope of human an non-chimpanzee primate CD3 epsilon chain as defined by the amino acid sequence of anyone of SEQ ID NOs: 2, 4, 6, or 8 or a fragment thereof. This is in clear contrast to CD3-binding molecules directed against a context-dependent CD3 epitope, like the constructs described in WO 99/54440, The binding molecules against context-independent CD3 epitopes, as (inter alia) provided in any one of SEQ ID NOs: 2, 4, 6, or 8 (or fragments of these sequences) provide for this substantially less (detrimental and non-desired) T cell redistribution. Because T cell redistribution during the starting phase of treatment with CD3 binding molecules is a major risk factor for CNS adverse events, the CD3 binding molecules provided herein and capable of recognizing a context independent CD3 epitope have a substantial advantage over the CD3 binding molecules known in the art and directed against context-dependent CD3 epitopes. Indeed none of the cynomolgus monkeys treated with MCSP-G4 VH-VL×I2C VH-VL showed any signs of CNS symptoms.

[0465] The context-independence of the CD3 epitope is provided in this invention and corresponds to the first 27 N-terminal amino acids of CD3 epsilon) or fragments of this 27 amino acid stretch. This context-independent epitope is taken out of its native environment within the CD3 complex and fused to heterologous amino acid sequences without loss of its structural integrity. Anti-CD3 binding molecules as provided herein and generated (and directed) against a context-independent CD3 epitope provide for a surprising clinical improvement with regard to T cell redistribution and, thus, a more favorable safety profile. Without being bound by theory, since their CD3 epitope is context-independent, forming an autonomous selfsufficient subdomain without much influence on the rest of the CD3 complex, the CD3 binding molecules provided herein induce less allosteric changes in CD3 conformation than the conventional CD3 binding molecules (like molecules provided in WO 99/54440), which recognize context-dependent CD3 epitopes like molecules provided in WO 99/54440. As a consequence (again without being bound by theory), the induction of intracellular NcK2 recruitment by the CD3 binding molecules provided herein is also reduced resulting in less isoform switch of T cell integrins and less adhesion of T cells to endothelial cells. It is preferred that preparations of CD3 binding molecules of the invention (directed against and generated against a context-independent epitope as defined herein) essentially consists of monomeric molecules. These monomeric molecules are even more efficient (than dimeric or multimeric molecules) in avoiding T cell redistribution and thus the risk of CNS adverse events during the starting phase of treatment.

### 16. Generation and Characterization of CD33 and CD3 Cross-Species Specific Bispecific Single Chain Molecules

### 16.1. Generation of CHO Cells Expressing Human CD33

[0466] The coding sequence of human CD33 as published in GenBank (Accession number NM_{—}001772) was obtained by gene synthesis according to standard protocols. The gene synthesis fragment was designed as to contain first a Kozak site for eukaryotic expression of the construct, followed by a 19 amino acid immunoglobulin leader peptide, followed in frame by the coding sequence of the mature human CD33 protein, followed in frame by the coding sequence of serine glycine dipeptide, a histidine₆-tag and a stop codon (the cDNA and amino acid sequence of the construct is listed under SEQ ID Nos 305 and 306). The gene synthesis fragment was also designed as to introduce restriction sites at the beginning and at the end of the fragment. The introduced restriction sites, EcoRI at the 5′ end and SalI at the 3′ end, were utilised in the following cloning procedures. The gene synthesis fragment was cloned via EcoRI and SalI into a plasmid designated pEF-DHFR (pEF-DHFR is described in Raum et al. Cancer Immunol Immunother 50 (2001) 141-150) following standard protocols. The aforementioned procedures were carried out according to standard protocols (Sambrook, Molecular Cloning; A Laboratory Manual, 3rd edition, Cold Spring Harbour Laboratory Press, Cold Spring Harbour, New York (2001)). A clone with sequence-verified nucleotide sequence was transfected into DHFR deficient CHO cells for eukaryotic expression of the construct. Eukaryotic protein expression in DHFR deficient CHO cells (ATCC No. CRL 9096) was performed as described by Kaufmann R. J. (1990) Methods Enzymol. 185, 537-566. Gene amplification of the construct was induced by increasing concentrations of methothrexate (MTX) to a final concentration of up to 20 nM MTX.

### 16.2. Generation of CHO Cells Expressing the Extracellular Domain of Macaque CD33

[0467] The cDNA sequence of macaque CD33 was obtained by a set of 3 PCRs on cDNA from macaque monkey bone marrow prepared according to standard protocols. The following reaction conditions: 1 cycle at 94° C. for 3 minutes followed by 35 cycles with 94° C. for 1 minute, 53° C. for 1 minute and 72° C. for 2 minutes followed by a terminal cycle of 72° C. for 3 minutes and the following primers were used:

1. forward primer:

(SEQ ID No. 369)

5′-gaggaattcaccatgccgctgctgctactgctgcccctgctgtggg
caggggccctggctatgg-3′
reverse primer:

(SEQ ID No. 370)

5′-gatttgtaactgtatttggtacttcc-3′
2. forward primer:

(SEQ ID No. 371)

5′-attccgcctccttggggatcc-3′
reverse primer:

(SEQ ID No. 372)

5′-gcataggagacattgagctggatgg-3′
3. forward primer:

(SEQ ID No. 373)

5′-gcaccaacctgacctgtcagg-3′
reverse primer:

(SEQ ID No. 374)

5′-agtgggtcgactcactgggtcctgacctctgagtattcg-3′

[0468] Those PCRs generate three overlapping fragments, which were isolated and sequenced according to standard protocols using the PCR primers, and thereby provided a portion of the cDNA sequence of macaque CD33 from the second nucleotide of codon +2 to the third nucleotide of codon +340 of the mature protein. To generate a construct for expression of macaque CD33 a cDNA fragment was obtained by gene synthesis according to standard protocols (the cDNA and amino acid sequence of the construct is listed under SEQ ID Nos 307 and 308). In this construct the coding sequence of macaque CD33 from amino acid+3 to +340 of the mature CD33 protein was fused into the coding sequence of human CD33 replacing the human coding sequence of the amino acids +3 to +340. The gene synthesis fragment was also designed as to contain a Kozak site for eukaryotic expression of the construct and restriction sites at the beginning and the end of the fragment containing the cDNA coding for essentially the whole extracellular domain of macaque CD33, the macaque CD33 transmembrane domain and a macaque-human chimeric intracellular CD33 domain. The introduced restriction sites XbaI at the 5′ end and SalI at the 3′ end, were utilised in the following cloning procedures. The gene synthesis fragment was then cloned via XbaI and SalI into a plasmid designated pEF-DHFR (pEF-DHFR is described in Raum et al. Cancer Immunol Immunother 50 (2001) 141-150). A sequence verified clone of this plasmid was used to transfect CHO/dhfr− cells as described above.

### 16.3. Generation of CD33 and CD3 Cross-Species Specific Bispecific Antibody Molecules

### Cloning of Cross-Species Specific Binding Molecules

[0469] Generally, bispecific antibody molecules, each comprising a domain with a binding specificity cross-species specific for human and non-chimpanzee primate CD3 epsilon as well as a domain with a binding specificity cross-species specific for human and non-chimpanzee primate CD33, were designed as set out in the following Table 5:

TABLE 5
Formats of anti-CD3 and anti-CD33 cross-
species specific bispecific molecules

| SEQ ID | Formats of protein constructs |
|---|---|
| (nucl/prot) | (N → C) |
| 276/275 | AH11HL × H2CHL |
| 258/257 | AH3HL × H2CHL |
| 270/269 | AC8HL × H2CHL |
| 264/263 | AF5HL × H2CHL |
| 288/287 | F2HL × H2CHL |
| 300/299 | E11HL × H2CHL |
| 282/281 | B3HL × H2CHL |
| 294/293 | B10HL × H2CHL |
| 278/277 | AH11HL × F12QHL |
| 260/259 | AH3HL × F12QHL |
| 272/271 | AC8HL × F12QHL |
| 266/265 | AF5HL × F12QHL |
| 290/289 | F2HL × F12QHL |
| 302/301 | E11HL × F12QHL |
| 284/283 | B3HL × F12QHL |
| 296/295 | B10HL × F12QHL |
| 280/279 | AH11HL × I2CHL |
| 262/261 | AH3HL × I2CHL |
| 274/273 | AC8HL × I2CHL |
| 268/267 | AF5HL × I2CHL |
| 292/291 | F2HL × I2CHL |
| 304/303 | E11HL × I2CHL |
| 286/285 | B3HL × I2CHL |
| 298/297 | B10HL × I2CHL |

[0470] The aforementioned constructs containing the variable light-chain (L) and variable heavy-chain (H) domains cross-species specific for human and macaque CD33 and the CD3 specific VH and VL combinations cross-species specific for human and macaque CD3 were obtained by gene synthesis. The gene synthesis fragments were designed and eukaryotic protein expression was performed similar as described in example 9 for the MCSP and CD3 cross-species specific single chain molecules. The same holds true for the expression and purification of the CD33 and CD3 cross-species specific single chain molecules.

[0471] In the Western Blot a single band was detected at 52 kD corresponding to the purified bispecific antibody.

### 16.4. Flow Cytometric Binding Analysis of the CD33 and Cd3 Cross-Species Specific Bispecific Antibodies

[0472] In order to test the functionality of the cross-species specific bispecific antibody constructs regarding the capability to bind to human and macaque CD33 and CD3, respectively, a FACS analysis was performed similar to the analysis described for the analysis of the MCSP and CD3 cross-species specific bispecific antibodies in example 10 using CHO cells expressing the human or macaque CD33 extracellular domains (see example 16.1 and 16.2).

[0473] The specific binding of human and non-chimpanzee primate CD3 of the CD3 binding molecules of the invention was clearly detectable as shown in FIG. 29. In the FACS analysis all constructs show binding to CD3 and CD33 as compared to the respective negative controls. Cross-species specificity of the bispecific antibodies to human and macaque CD3 and CD33 antigens is demonstrated.

### 16.5. Bioactivity of CD33 and CD3 Cross-Species Specific Bispecific Antibodies

[0474] Bioactivity of the generated bispecific antibodies was analyzed by chromium 51 (⁵¹Cr) release in vitro cytotoxicity assays using the CD33 positive cell lines described in Examples 16.1 and 16.2. As effector cells stimulated human CD4/CD56 depleted PBMC or the macaque T cell line 4119LnPx were used as specified in the respective figures. The cytotoxicity assays were performed similar to the setting described for the bioactivity analysis of the MCSP and CD3 cross-species specific bispecific antibodies in example 11 using CHO cells expressing the human or macaque CD33 extracellular domains (see example 16.1 and 16.2) as target cells.

[0475] As shown in FIG. 30, all of the generated cross-species specific bispecific constructs demonstrate cytotoxic activity against human CD33 positive target cells elicited by stimulated human CD4/CD56 depleted PBMC and against macaque CD33 positive target cells elicited by the macaque T cell line 4119LnPx.

### 17. Purification of Cross-Species Specific Bispecific Single Chain Molecules by an Affinity Procedure Based on the Context Independent CD3 Epsilon Epitope Corresponding to the N-Terminal Amino Acids 1-27

### 17.1 Generation of an Affinity Column Displaying the Isolated Context Independent Human CD3 Epsilon Epitope Corresponding to the N-Terminal Amino Acids 1-27

[0476] The plasmid for expression of the construct 1-27 CD3-Fc consisting of the 1-27 N-terminal amino acids of the human CD3 epsilon chain fused to the hinge and Fc gamma region of human immunoglobulin IgG1 described above (Example 3; cDNA sequence and amino acid sequence of the recombinant fusion protein are listed under SEQ ID NOs 230 and 229) was transfected into DHFR deficient CHO cells for eukaryotic expression of the construct. Eukaryotic protein expression in DHFR deficient CHO cells was performed as described by Kaufmann R. J. (1990) Methods Enzymol. 185, 537-566. Gene amplification of the construct was induced by increasing concentrations of methotrexate (MTX) to a final concentration of up to 20 nM MTX. After two passages of stationary culture the cells were grown in roller bottles with nucleoside-free HyQ PF CHO liquid soy medium (with 4.0 mM L-Glutamine with 0.1% Pluronic F-68; HyClone) for 7 days before harvest. The cells were removed by centrifugation and the supernatant containing the expressed protein was stored at −20° C. For the isolation of the fusion protein a goat anti-human fc affinity column was prepared according to standard protocols using a commercially available affinity purified goat anti-human IgG fc fragment specific antibody with minimal cross-reaction to bovine, horse, and mouse serum proteins (Jackson ImmunoResearch Europe Ltd.). Using this affinity column the fusion protein was isolated out of cell culture supernatant on an Akta Explorer System (GE Amersham) and eluted by citric acid. The eluate was neutralized and concentrated. After dialysis against amine free coupling buffer the purified fusion protein was coupled to an N-Hydroxy-Succinimide NHS activated 1 ml HiTrap column (GE Amersham). After coupling remaining NHS groups were blocked and the column was washed and stored at 5° C. in storage buffer containing 0.1% sodium azide.

### 17.2 Purification of Cross-Species Specific Bispecific Single Chain Molecules Using a Human CD3 Peptide Affinity Column

[0477] 200 ml cell culture supernatant of cells expressing cross-species specific bispecific single chain molecules were 0.2 μm sterile filtered and applied to the CD3 peptide affinity column using an Akta Explorer system (GE Amersham).

[0478] The column was then washed with phosphate buffered saline PBS pH 7.4 to wash out unbound sample. Elution was done with an acidic buffer pH 3.0 containing 20 mM Citric acid and 1 M sodium chloride. Eluted protein was neutralized immediately by 1 M Trishydroxymethylamine TRIS pH 8.3 contained in the collection tubes of the fraction collector.

[0479] Protein analysis was done by SDS PAGE and Western Blot.

[0480] For SDS PAGE BisTris Gels 4-12% are used (Invitrogen). The running buffer was 1×MES-SDS-Puffer (Invitrogen). As protein standard 15 μl prestained Sharp Protein Standard (Invitrogen) was applied. Electrophoresis was performed for 60 minutes at 200 volts I2C mA max. Gels were washed in demineralised water and stained with Coomassie for one hour. Gels are destained in demineralised water for 3 hours.

[0481] Pictures are taken with a Syngene Gel documentation system.

[0482] For Western Blot a double of the SDS PAGE gel was generated and proteins were electroblotted onto a nitrocellulose membrane. The membrane was blocked with 2% bovine serum albumin in PBS and incubated with a biotinylated murine Penta His antibody (Qiagen). As secondary reagent a streptavidin alkaline phosphatase conjugate (DAKO) was used. Blots were developed with BCIP/NBT substrate solution (Pierce).

[0483] As demonstrated in FIGS. 31, 32 and 33 the use of a human CD3 peptide affinity column as described above allows the highly efficient purification of the bispecific single chain molecules from cell culture supernatant. The cross-species specific anti-CD3 single chain antibodies contained in the bispecific single chain molecules therefore enable via their specific binding properties an efficient generic one-step method of purification for the cross-species specific bispecific single chain molecules, without the need of any tags solely attached for purification purposes.

### 18. Generic Pharmacokinetic Assay for Cross-Species Specific Bispecific Single Chain Molecules

### 18.1 Production of 1-27 CD3-Fc for Use in the Pharmacokinetic Assay

[0484] The coding sequence of the 1-27 N-terminal amino acids of the human CD3 epsilon chain fused to the hinge and Fc gamma region of human immunoglobulin IgG1 was obtained by gene synthesis according to standard protocols (cDNA sequence and amino acid sequence of the recombinant fusion protein are listed under SEQ ID NOs 309 and 310). The gene synthesis fragment was designed as to contain first a Kozak site for eukaryotic expression of the construct, followed by a 19 amino acid immunoglobulin leader peptide, followed in frame by the coding sequence of the first 27 amino acids of the extracellular portion of the mature human CD3 epsilon chain, followed in frame by the coding sequence of the hinge region and Fc gamma portion of human IgG1 and a stop codon. The gene synthesis fragment was also designed and cloned as described in example 3.1, supra. A clone with sequence-verified nucleotide sequence was transfected into DHFR deficient CHO cells for eukaryotic expression of the construct. Eukaryotic protein expression in DHFR deficient CHO cells was performed as described in example 9, supra. For the isolation of the fusion protein a goat anti-human fc affinity column was prepared according to standard protocols using a commercially available affinity purified goat anti-human IgG fc fragment specific antibody with minimal cross-reaction to bovine, horse, and mouse serum proteins (Jackson ImmunoResearch Europe Ltd.). Using this affinity column the fusion protein was isolated out of cell culture supernatant on an Akta Explorer System (GE Amersham) and eluted by citric acid. The eluate was neutralized and concentrated.

### 18.2 Pharmacokinetic Assay for Cross-Species Specific Bispecific Single Chain Molecules

[0485] The assay is based on the ECL-ELISA technology using ruthenium labelled detection on carbon plates measured on a Sektor Imager device (MSD). In a first step, carbon plates (MSD High Bind Plate 96 well Cat: L15xB-3) were coated with 5 μl/well at 50 ng/ml of the purified 1-27 CD3-Fc described in Example 18.1. The plate was then dried overnight at 25° C. Subsequently plates were blocked with 5% BSA (Paesel&Lorei #100568) in PBS at 150 μl/well for 1 h at 25° C. in an incubator while shaking (700 rpm). In the next step plates were washed three times with 0.05% Tween in PBS. A standard curve in 50% macaque serum in PBS was generated by serial 1:4 dilution starting at 100 ng/ml of the respective cross-species specific bispecific single chain molecule to be detected in the assay. Quality control (QC) samples were prepared in 50% macaque serum in PBS ranging from 1 ng/ml to 50 ng/ml of the respective cross-species specific bispecific single chain molecule dependent on the expected sample serum concentrations. Standard, QC or unknown samples were transferred to the carbon plates at 10 μl/well and incubated for 90 min at 25° C. in the incubator while shaking (700 rpm). Subsequently plates were washed three times with 0.05% Tween in PBS. For detection 25 μl/well of penta-His-Biotin antibody (Qiagen, 200 μg/ml in 0.05% Tween in PBS) was added and incubated for 1 h at 25° C. in an incubator while shaking (700 rpm). In a second detection step 25 μl/well Streptavidin-SulfoTag solution (MSD; Cat: R32AD-1; Lot: WO010903) was added and incubated for 1 h at 25° C. in an incubator while shaking (700 rpm). Subsequently plates were washed three times with 0.05% Tween in PBS. Finally 150 μl/well MSD Reading Buffer (MSD, Cat: R9ZC-1) was added and plates were read in the Sektor Imager device.

[0486] FIGS. 34 and 35 demonstrate the feasibility of detection of cross-species specific bispecific single chain molecules in serum samples of macaque monkeys for cross-species specific bispecific single chain molecules. The cross-species specific anti-CD3 single chain antibodies contained in the bispecific single chain molecules enable therefore via their specific binding properties a highly sensitive generic assay for detection of the cross-species specific bispecific single chain molecules. The assay set out above can be used in the context of formal toxicological studies that are needed for drug development and can be easily adapted for measurement of patient samples in connection with the clinical application of cross-species specific bispecific single chain molecules.

### 19. Generation of Recombinant Transmembrane Fusion Proteins of the N-Terminal Amino Acids 1-27 of CD3 Epsilon from Different Non-Chimpanzee Primates Fused to EpCAM from Cynomolgus Monkey (1-27 CD3-EpCAM)

### 19.1 Cloning and Expression of 1-27 CD3-EpCAM

[0487] CD3 epsilon was isolated from different non-chimpanzee primates (marmoset, tamarin, squirrel monkey) and swine. The coding sequences of the 1-27 N-terminal amino acids of CD3 epsilon chain of the mature human, common marmoset (Callithrix jacchus), cottontop tamarin (Saguinus oedipus), common squirrel monkey (Saimiri sciureus) and domestic swine (Sus scrofa; used as negative control) fused to the N-terminus of Flag tagged cynomolgus EpCAM were obtained by gene synthesis according to standard protocols (cDNA sequence and amino acid sequence of the recombinant fusion proteins are listed under SEQ ID NOs 231 to 240). The gene synthesis fragments were designed as to contain first a BsrGI site to allow for fusion in correct reading frame with the coding sequence of a 19 amino acid immunoglobulin leader peptide already present in the target expression vector, which was followed in frame by the coding sequence of the N-terminal 1-27 amino acids of the extracellular portion of the mature CD3 epsilon chains, which was followed in frame by the coding sequence of a Flag tag and followed in frame by the coding sequence of the mature cynomolgus EpCAM transmembrane protein. The gene synthesis fragments were also designed to introduce a restriction site at the end of the cDNA coding for the fusion protein. The introduced restriction sites BsrGI at the 5′ end and SalI at the 3′ end, were utilized in the following cloning procedures. The gene synthesis fragments were then cloned via BsrGI and SalI into a derivative of the plasmid designated pEF-DHFR (pEF-DHFR is described in Raum et al. Cancer Immunol Immunother 50 (2001) 141-150), which already contains the coding sequence of the 19 amino acid immunoglobulin leader peptide following standard protocols. Sequence verified plasmids were used to transfect DHFR deficient CHO cells for eukaryotic expression of the construct. Eukaryotic protein expression in DHFR deficient CHO cells was performed as described by Kaufmann R. J. (1990) Methods Enzymol. 185, 537-566. Gene amplification of the construct was induced by increasing concentrations of methotrexate (MTX) to a final concentration of up to 20 nM MTX.

[0488] Transfectants were tested for cell surface expression of the recombinant transmembrane protein via an FACS assay according to standard protocols. For that purpose a number of 2.5×10⁵ cells were incubated with 50 μl of the anti-Flag M2 antibody (Sigma-Aldrich Chemie GmbH, Taufkirchen, Germany) at 5 μg/ml in PBS with 2% FCS. Bound antibody was detected with an R-Phycoerythrin-conjugated affinity purified F(ab′)2 fragment, goat anti-mouse IgG, Fc-gamma fragment specific 1:100 in PBS with 2% FCS (Jackson ImmunoResearch Europe Ltd., Newmarket, Suffolk, UK). Flow cytometry was performed on a FACS-Calibur apparatus, the CellQuest software was used to acquire and analyze the data (Becton Dickinson biosciences, Heidelberg). FACS staining and measuring of the fluorescence intensity were performed as described in Current Protocols in Immunology (Coligan, Kruisbeek, Margulies, Shevach and Strober, Wiley-Interscience, 2002).

[0489] Expression of the Flag tagged recombinant transmembrane fusion proteins consisting of cynomolgus EpCAM and the 1-27 N-terminal amino acids of the human, marmoset, tamarin, squirrel monkey and swine CD3 epsilon chain respectively on transfected cells is clearly detectable (FIG. 36).

### 19.2 Cloning and Expression of the Cross-Species Specific Anti-CD3 Single Chain Antibody I2C HL in Form of an IgG1 Antibody

[0490] In order to provide improved means of detection of binding of the cross-species specific single chain anti-CD3 antibody the I2C VHVL specificity is converted into an IgG1 antibody with murine IgG1 and murine kappa constant regions. cDNA sequences coding for the heavy chain of the IgG antibody were obtained by gene synthesis according to standard protocols. The gene synthesis fragments were designed as to contain first a Kozak site to allow for eukaryotic expression of the construct, which is followed by an 19 amino acid immunoglobulin leader peptide, which is followed in frame by the coding sequence of the heavy chain variable region or light chain variable region, followed in frame by the coding sequence of the heavy chain constant region of murine IgG1 as published in GenBank (Accession number AB097849) or the coding sequence of the murine kappa light chain constant region as published in GenBank (Accession number D14630), respectively.

[0491] Restriction sites were introduced at the beginning and the end of the cDNA coding for the fusion protein. Restriction sites EcoRI at the 5′ end and SalI at the 3′ end were used for the following cloning procedures. The gene synthesis fragments were cloned via EcoRI and SalI into a plasmid designated pEF-DHFR (pEF-DHFR is described in Raum et al. Cancer Immunol Immunother 50 (2001) 141-150) for the heavy chain construct and pEFADA (pEFADA is described in Raum et al. loc cit.) for the light chain construct according to standard protocols. Sequence verified plasmids were used for co-transfection of respective light and heavy chain constructs into DHFR deficient CHO cells for eukaryotic expression of the construct. Eukaryotic protein expression in DHFR deficient CHO cells was performed as described by Kaufmann R. J. (1990) Methods Enzymol. 185, 537-566. Gene amplification of the constructs was induced by increasing concentrations of methotrexate (MTX) to a final concentration of up to 20 nM MTX and deoxycoformycin (dCF) to a final concentration of up to 300 nM dCF. After two passages of stationary culture cell culture supernatant was collected and used in the subsequent experiment.

### 19.3 Binding of the Cross-Species Specific Anti-CD3 Single Chain Antibody I2C HL in Form of an IgG1 Antibody to 1-27 CD3-EpCAM

[0492] Binding of the generated I2C IgG1 construct to the 1-27 N-terminal amino acids of the human, marmoset, tamarin and squirrel monkey CD3 epsilon chains respectively fused to cynomolgus Ep-CAM as described in Example 19.1 was tested in a FACS assay according to standard protocols. For that purpose a number of 2.5×10⁵ cells were incubated with 50 μl of cell culture supernatant containing the I2C IgG1 construct as described in Example 19.2. The binding of the antibody was detected with an R-Phycoerythrin-conjugated affinity purified F(ab′)2 fragment, goat anti-mouse IgG, Fc-gamma fragment specific, diluted 1:100 in PBS with 2% FCS (Jackson ImmunoResearch Europe Ltd., Newmarket, Suffolk, UK). Flow cytometry was performed on a FACS-Calibur apparatus, the CellQuest software was used to acquire and analyze the data (Becton Dickinson biosciences, Heidelberg). FACS staining and measuring of the fluorescence intensity were performed as described in Current Protocols in Immunology (Coligan, Kruisbeek, Margulies, Shevach and Strober, Wiley-Interscience, 2002).

[0493] As shown in FIG. 37 binding of the I2C IgG1 construct to the transfectants expressing the recombinant transmembrane fusion proteins consisting of the 1-27 N-terminal amino acids of CD3 epsilon of human, marmoset, tamarin or squirrel monkey fused to cynomolgus EpCAM as compared to the negative control consisting of the 1-27 N-terminal amino acids of CD3 epsilon of swine fused to cynomolgus EpCAM was observed. Thus multi-primate cross-species specificity of I2C was demonstrated. Signals obtained with the anti Flag M2 antibody and the I2C IgG1 construct were comparable, indicating a strong binding activity of the cross-species specific specificity I2C to the N-terminal amino acids 1-27 of CD3 epsilon.

### 20. Binding of the Cross-Species Specific Anti-CD3 Binding Molecule I2C to the Human CD3 Epsilon Chain with and without N-Terminal His6 Tag

[0494] A chimeric IgG1 antibody with the binding specificity I2C as described in Example 19.2 specific for CD3 epsilon was tested for binding to human CD3 epsilon with and without N-terminal His6 tag. Binding of the antibody to the EL4 cell lines transfected with His6-human CD3 epsilon as described in Example 6.1 and wild-type human CD3 epsilon as described in Example 5.1 respectively was tested by a FACS assay according to standard protocols. 2.5×10⁵ cells of the transfectants were incubated with 50 μl of cell culture supernatant containing the I2C IgG1 construct or 50 μl of the respective control antibodies at 5 μg/ml in PBS with 2% FCS. As negative control an appropriate isotype control and as positive control for expression of the constructs the CD3 specific antibody UCHT-1 were used respectively. Detection of the His6 tag was performed with the penta His antibody (Qiagen). The binding of the antibodies was detected with a R-Phycoerythrin-conjugated affinity purified F(ab′)2 fragment, goat anti-mouse IgG, Fc-gamma fragment specific, diluted 1:100 in PBS with 2% FCS (Jackson ImmunoResearch Europe Ltd., Newmarket, Suffolk, UK). Flow cytometry was performed on a FACS-Calibur apparatus, the CellQuest software was used to acquire and analyze the data (Becton Dickinson biosciences, Heidelberg). FACS staining and measuring of the fluorescence intensity were performed as described in Current Protocols in Immunology (Coligan, Kruisbeek, Margulies, Shevach and Strober, Wiley-Interscience, 2002).

[0495] Comparable binding of the anti-human CD3 antibody UCHT-1 to both transfectants demonstrates approximately equal levels of expression of the constructs. The binding of the penta His antibody confirmed the presence of the His6 tag on the His6-human CD3 construct but not on the wild-type construct.

[0496] Compared to the EL4 cell line transfected with wild-type human CD3 epsilon a clear loss of binding of the I2C IgG1 construct to human-CD3 epsilon with an N-terminal His 6 tag was detected. These results show that a free N-terminus of CD3 epsilon is essential for binding of the cross-species specific anti-CD3 binding specificity I2C to the human CD3 epsilon chain (FIG. 28).

### 21. Generation of CD33 and CD3 Cross-Species Specific Bispecific Single Chain Molecules

### 21.1 Generation of CD33 and CD3 Cross-Species Specific Bispecific Single Chain Molecules

[0497] Generally, bispecific single chain antibody molecules, each comprising a domain with a binding specificity cross-species specific for human and macaque CD3 epsilon as well as a domain with a binding specificity cross-species specific for human and macaque CD33, were designed as set out in the following Table 6:

TABLE 6
Formats of anti-CD3 and anti-CD33 cross-species specific
bispecific single chain antibody molecules

| SEQ ID | Formats of protein constructs |
|---|---|
| (nucl/prot) | (N → C) |
| 316/315 | I2CHL × AF5HL |
| 314/313 | F12QHL × AF5HL |
| 312/311 | H2CHL × AF5HL |

[0498] The aforementioned constructs containing the variable light-chain (L) and variable heavy-chain (H) domains cross-species specific for human and macaque CD33 and the CD3 specific VH and VL combinations cross-species specific for human and macaque CD3 were obtained by gene synthesis. The gene synthesis fragments were designed in analogy to the procedure described in example 9 for the MCSP and CD3 cross-species specific single chain molecules. A clone with sequence-verified nucleotide sequence was transfected into DHFR deficient CHO cells for eukaryotic expression of the construct. Eukaryotic protein expression in DHFR deficient CHO cells was performed as also described in example 9 for the MCSP and CD3 cross-species specific single chain molecules and used in the subsequent experiments.

### 21.2 Flow Cytometric Binding Analysis of the CD33 and CD3 Cross-Species Specific Bispecific Antibodies

[0499] In order to test the functionality of the cross-species specific bispecific antibody constructs regarding the capability to bind to human and macaque CD33 and CD3, respectively, a FACS analysis is performed similar to the analysis described for the analysis of the MCSP and CD3 cross-species specific bispecific antibodies in example 10 using CHO cells expressing the human or macyque CD33 extracellular domains (see examples 16.1 and 16.2).

[0500] The bispecific binding of the single chain molecules listed above, which were cross-species specific for CD33 and cross-species specific for human and non-chimpanzee primate CD3 was clearly detectable as shown in FIG. 41. In the FACS analysis all constructs showed binding to CD3 and CD33 as compared to the respective negative controls. Cross-species specificity of the bispecific antibodies to human and macaque CD3 and CD33 antigens was demonstrated.

### 21.3. Bioactivity of CD33 and CD3 Cross-Species Specific Bispecific Single Chain Antibodies

[0501] Bioactivity of the generated bispecific single chain antibodies was analyzed by chromium 51 (⁵¹Cr) release in vitro cytotoxicity assays using the CD33 positive cell lines described in Examples 16.1 and 16.2. As effector cells stimulated human CD4/CD56 depleted PBMC or the macaque T cell line 4119LnPx were used as specified in the respective figures. The cytotoxicity assays were performed similar to the procedure described for the bioactivity analysis of the MCSP and CD3 cross-species specific bispecific antibodies in example 11 using CHO cells expressing the human or macaque CD33 extracellular domains (see example 16.1 and 16.2) as target cells.

[0502] As shown in FIG. 42, all of the generated cross-species specific bispecific single chain antibody constructs demonstrate cytotoxic activity against human CD33 positive target cells elicited by stimulated human CD4/CD56 depleted PBMC and against macaque CD33 positive target cells elicited by the macaque T cell line 4119LnPx.

### 22. Redistribution of Circulating Chimpanzee T Cells upon Exposure to a Conventional Bispecific CD3 Binding Molecule Directed at a Target Molecule which is Absent from Circulating Blood Cells

[0503] A single male chimpanzee was subjected to dose escalation with intravenous single-chain EpCAM/CD3-bispecific antibody construct (Schlereth (2005) Cancer Res 65: 2882). Like in the conventional single-chain CD19/CD3-bispecific antibody construct (Loffler (2000, Blood, Volume 95, Number 6) or WO 99/54440), the CD3 arm of said EpCAM/CD3-construct is also directed against a conventional context dependent epitope of human and chimpanzee CD3. At day 0, the animal received 50 ml PBS/5% HSA without test material, followed by 50 ml PBS/5% HSA plus single-chain EpCAM/CD3-bispecific antibody construct at 1.6, 2.0, 3.0 and 4.5 μg/kg on days 7, 14, 21 and 28, respectively. The infusion period was 2 hours per administration. For each weekly infusion the chimpanzee was sedated with 2-3 mg/kg Telazol intramuscularly, intubated and placed on isoflurane/O₂ anesthesia with stable mean blood pressures. A second intravenous catheter was placed in an opposite limb to collect (heparinized) whole blood samples at the time points indicated in FIG. 43 for FACS analysis of circulating blood cells. After standard erythrocyte lysis, T cells were stained with a FITC-labeled antibody reacting with chimpanzee CD2 (Becton Dickinson) and the percentage of T cells per total lymphocytes determined by flowcytometry. As shown in FIG. 43, every administration of single-chain EpCAM/CD3-bispecific antibody construct induced a rapid drop of circulating T cells as observed with single-chain CD19/CD3-bispecific antibody construct in B-NHL patients, who had essentially no circulating target B (lymphoma) cells. As there are no EpCAM-positive target cells in the circulating blood of humans and chimpanzees, the drop of circulating T cells upon exposure to the single-chain EpCAM/CD3-bispecific antibody construct can be attributed solely to a signal, which the T cells receive through pure interaction of the CD3 arm of the construct with a conventional context dependent CD3 epitope in the absence of any target cell mediated crosslinking. Like the redistribution of T cells induced through their exposure to single-chain CD19/CD3-bispecific antibody construct in B-NHL patients, who had essentially no circulating target B (lymphoma) cells, the T cell redistribution in the chimpanzee upon exposure to the single-chain EpCAM/CD3-bispecific antibody construct can be explained by a conformational change of CD3 following the binding event to a context dependent CD3 epitope further resulting in the transient increase of T cell adhesiveness to blood vessel endothelium (see Example 13). This finding confirms, that conventional CD3 binding molecules directed to context dependent CD3 epitopes—solely through this interaction—can lead to a redistribution pattern of peripheral blood T cells, which is associated with the risk of CNS adverse events in humans as describe in Example 13.

23. Specific Binding of scFv Clones to the N-Terminus of Human CD3 Epsilon
23.1 Bacterial Expression of scFv Constructs in E. coli XL1 Blue

[0504] As previously mentioned, E. coli XL1 Blue transformed with pComb3H₅Bhis/Flag containing a VL- and VH-segment produce soluble scFv in sufficient amounts after excision of the gene III fragment and induction with 1 mM IPTG. The scFv-chain is exported into the periplasma where it folds into a functional conformation.

[0505] The following scFv clones were chosen for this experiment:

i) ScFvs 4-10, 3-106, 3-114, 3-148, 4-48, 3-190 and 3-271 as described in WO 2004/106380.
ii) ScFvs from the human anti-CD3 epsilon binding clones H2C, F12Q and I2C as described herein.

[0506] For periplasmic preparations, bacterial cells transformed with the respective scFv containing plasmids allowing for periplasmic expression were grown in SB-medium supplemented with 20 mM MgCl₂ and carbenicillin 50 μg/ml and redissolved in PBS after harvesting. By four rounds of freezing at −70° C. and thawing at 37° C., the outer membrane of the bacteria was destroyed by osmotic shock and the soluble periplasmic proteins including the scFvs were released into the supernatant. After elimination of intact cells and cell-debris by centrifugation, the supernatant containing the human anti-human CD3-scFvs was collected and used for further examination. These crude supernatants containing scFv will be further termed periplasmic preparations (PPP).

23.2 Binding of scFvs to Human CD3 Epsilon (aa 1-27)-Fc Fusion Protein

[0507] ELISA experiments were carried out by coating the human CD3 epsilon (aa 1-27)-Fc fusion protein to the wells of 96 well plastic plates (Nunc, maxisorb) typically at 4° C. over night. The antigen coating solution was then removed, wells washed once with PBS/0.05% Tween 20 and subsequently blocked with PBS/3% BSA for at least one hour. After removal of the blocking solution, PPPs and control solutions were added to the wells and incubated for typically one hour at room temperature. The wells were then washed three times with PBS/0.05% Tween 20. Detection of scFvs bound to immobilized antigen was carried out using a Biotin-labeled anti FLAG-tag antibody (M2 anti Flag-Bio, Sigma, typically at a final concentration of 1 μg/ml PBS) and detected with a peroxidase-labeled Streptavidine (Dianova, 1 μg/ml PBS). The signal was developed by adding ABTS substrate solution and measured at a wavelength of 405 nm. Unspecific binding of the test-samples to the blocking agent and/or the human IgG1 portion of the human CD3 epsilon (aa 1-27)-Fc fusion protein was examined by carrying out the identical assay with the identical reagents and identical timing on ELISA plates which were coated with human IgG1 (Sigma). PBS was used as a negative control.

[0508] As shown in FIG. 44, scFvs H2C, F12Q and I2C show strong binding signals on human CD3 epsilon (aa 1-27)-Fc fusion protein. The human scFvs 3-106, 3-114, 3-148, 3-190, 3-271, 4-10 and 4-48 (as described in WO 2004/106380) do not show any significant binding above negative control level.

[0509] To exclude the possibility that the positive binding of scFvs H2C, F12Q and I2C to wells coated with human CD3 epsilon (aa 1-27)-Fc fusion protein might be due to binding to BSA (used as a blocking agent) and/or the human IgG1 Fc-gamma-portion of the human CD3 epsilon (aa 1-27)-Fc fusion protein, a second ELISA experiment was performed in parallel. In this second ELISA experiment, all parameters were identical to those in the first ELISA experiment, except that in the second ELISA experiment human IgG1 (Sigma) was coated instead of human CD3 epsilon (aa 1-27)-Fc fusion protein. As shown in FIG. 45, none of the scFvs tested showed any significant binding to BSA and/or human IgG1 above background level. Taken together, these results allow the conclusion that conventional CD3 binding molecules recognizing a context-dependent epitope of CD3 epsilon (e.g. as disclosed in WO 2004/106380) do not bind specifically to the human CD3 epsilon (aa 1-27)-region, whereas the scFvs H2C, F12Q and I2C binding a context-independent epitope of CD3 epsilon clearly show specific binding to the N-terminal 27 amino acids of human CD3 epsilon.

### 24. Generation and Characterization of PSMA and CD3 Cross-Species Specific Bispecific Single Chain Antibody Molecules

### 24.1 Cloning and Expression of Human PSMA Antigen on CHO Cells

[0510] The sequence of the human PSMA antigen (‘AY101595’, Homo sapiens prostate-specific membrane antigen mRNA, complete cds, National Center for Biotechnology Information, http://www.ncbi.nlm.nih.gov/entrez) was used to obtain a synthetic molecule by gene synthesis according to standard protocols. The gene synthesis fragment was also designed as to contain a Kozak site for eukaryotic expression of the construct and restriction sites at the beginning and the end of the DNA. The introduced restriction sites XbaI at the 5′ end and SalI at the 3′ end were utilised during the cloning step into the expression plasmid designated pEFDHFR as described in Mack et al. (Mack M et al., Proc Natl Acad Sci USA 1995; 92:7021-5. and Raum et al. Cancer Immunol Immunother (2001) 50(3)). After sequence verification the plasmid was used to transfect CHO/dhfr− cells as follows. A sequence verified plasmid was used to transfect CHO/dhfr− cells (ATCC No. CRL 9096; cultivated in RPMI 1640 with stabilized glutamine obtained from Biochrom AG Berlin, Germany, supplemented with 10% FCS, 1% penicillin/streptomycin all obtained from Biochrom AG Berlin, Germany and nucleosides from a stock solution of cell culture grade reagents obtained from Sigma-Aldrich Chemie GmbH, Taufkirchen, Germany, to a final concentration of 10 μg/ml Adenosine, 10 μg/ml Deoxyadenosine and 10 μg/ml Thymidine, in an incubator at 37° C., 95% humidity and 7% CO₂). Transfection was performed using the PolyFect Transfection Reagent (Qiagen GmbH, Hilden, Germany) and 5 μg of plasmid DNA according to the manufacturer's protocol. After a cultivation of 24 hours cells were washed once with PBS and again cultivated in the aforementioned cell culture medium except that the medium was not supplemented with nucleosides and dialysed FCS (obtained from Biochrom AG Berlin, Germany) was used. Thus the cell culture medium did not contain nucleosides and thereby selection was applied on the transfected cells. Approximately 14 days after transfection the outgrowth of resistant cells was observed. After an additional 7 to 14 days the transfectants were tested positive for expression of the construct via FACS. Eukaryotic protein expression in DHFR deficient CHO cells is performed as described by Kaufmann R. J. (1990) Methods Enzymol. 185, 537-566. Gene amplification of the construct is induced by increasing concentrations of methothrexate (MTX) to a final concentration of up to 20 nM MTX

### 24.2 Cloning and Expression of Macaque PSMA Antigen on CHO Cells

[0511] The cDNA sequence of macaque PSMA (cynomolgus) was obtained by a set of five PCRs on cDNA from macaque monkey prostate prepared according to standard protocols. The following reaction conditions: 1 cycle at 94° C. for 2 minutes followed by 40 cycles with 94° C. for 1 minute, 52° C. for 1 minute and 72° C. for 1.5 minutes followed by a terminal cycle of 72° C. for 3 minutes and the following primers were used:

4. forward primer:

(SEQ ID NO. 375)

5′-cactgtggcccaggttcgagg-3′
reverse primer:

(SEQ ID NO. 376)

5′-gacataccacacaaattcaatacgg-3′
5. forward primer:

(SEQ ID NO. 377)

5′-gctctgctcgcgccgagatgtgg-3′
reverse primer:

(SEQ ID NO. 378)

5′-acgctggacaccacctccagg-3′
6. forward primer:

(SEQ ID NO. 379)

5′-ggttctactgagtgggcagagg-3′
reverse primer:

(SEQ ID NO. 380)

5′-acttgttgtggctgcttggagc-3′
7. forward primer:

(SEQ ID NO. 381)

5′-gggtgaagtcctatccagatgg-3′
reverse primer:

(SEQ ID NO. 382)

5′-gtgctctgcctgaagcaattcc-3′
8. forward primer:

(SEQ ID NO. 383)

5′-ctcggcttcctcttcgggtgg-3′
reverse primer:

(SEQ ID NO. 384)

5′-gcatattcatttgctgggtaacctgg-3′

[0512] These PCRs generated five overlapping fragments, which were isolated and sequenced according to standard protocols using the PCR primers, and thereby provided a portion of the cDNA sequence coding macaque PSMA from codon 3 to the last codon of the mature protein. To generate a construct for expression of macaque PSMA a cDNA fragment was obtained by gene synthesis according to standard protocols (the cDNA and amino acid sequence of the construct is listed under SEQ ID 385 and 386). In this construct the coding sequence of macaque PSMA from amino acid 3 to the last amino acid of the mature PSMA protein followed by a stop codon was fused in frame to the coding sequence of the first two amino acids of the human PSMA protein. The gene synthesis fragment was also designed as to contain a Kozak site for eukaryotic expression of the construct and restriction sites at the beginning and the end of the fragment containing the cDNA. The introduced restriction sites, XbaI at the 5′ end and SalI at the 3′ end, were utilised in the following cloning procedures. The gene synthesis fragment was cloned via XbaI and SalI into a plasmid designated pEF-DHFR following standard protocols. The aforementioned procedures were carried out according to standard protocols (Sambrook, Molecular Cloning; A Laboratory Manual, 3rd edition, Cold Spring Harbour Laboratory Press, Cold Spring Harbour, New York (2001)). A clone with sequence-verified nucleotide sequence was transfected into DHFR deficient CHO cells for eukaryotic expression of the construct. Eukaryotic protein expression in DHFR deficient CHO cells was performed as described by Kaufmann R. J. (1990) Methods Enzymol. 185, 537-566. Gene amplification of the construct was induced by increasing concentrations of methotrexate (MTX) to a final concentration of up to 20 nM MTX.

### 24.3 Generation of PSMA and CD3 Cross-Species Specific Bispecific Single Chain Molecules

[0513] Generally, bispecific single chain antibody molecules, each comprising a domain with a binding specificity for the human and the macaque CD3 antigen as well as a domain with a binding specificity for the human and the macaque PSMA antigen, were designed as set out in the following Table 7:

TABLE 7
Formats of anti-CD3 and anti-PSMA cross-species specific
bispecific single chain antibody molecules

| SEQ ID NO. | Formats of protein constructs |
|---|---|
| (nucl/prot) | (N → C) |
| 400/399 | PSMA-3 HL × I2C HL |
| 414/413 | PSMA-4 HL × I2C HL |
| 428/427 | PSMA-6 LH × I2C HL |
| 442/441 | PSMA-7 LH × I2C HL |
| 456/455 | PSMA-8 LH × I2C HL |
| 470/469 | PSMA-9 LH × I2C HL |
| 484/483 | PSMA-10 LH × I2C HL |
| 498/497 | PSMA-A LH × I2C HL |
| 512/511 | PSMA-B LH × I2C HL |
| 526/525 | PSMA-C LH × I2C HL |
| 540/539 | PSMA-D LH × I2C HL |
| 554/553 | PSMA-E LH × I2C HL |
| 568/567 | PSMA-F LH × I2C HL |
| 582/581 | PSMA-J LH × I2C HL |
| 596/595 | PSMA-L LH × I2C HL |

[0514] The aforementioned constructs containing the variable light-chain (L) and variable heavy-chain (H) domains cross-species specific for human and macaque PSMA and the CD3 specific VH and VL combinations cross-species specific for human and macaque CD3 were obtained by gene synthesis. The gene synthesis fragments were designed and eukaryotic protein expression was performed in analogy to the procedure described in example 9 for the MCSP and CD3 cross-species specific single chain molecules. Alternatively the constructs can be transfected into DHFR-deficient CHO-cells in a transient manner according to standard protocols.

### 24.4 Flow Cytometric Binding Analysis of the Psma and CD3 Cross-Species Specific Bispecific Antibodies

[0515] In order to test the functionality of the cross-species specific bispecific antibody constructs with regard to binding capability to human and macaque PSMA and to human and macaque CD3, a FACS analysis was performed. For this purpose the CHO cells transfected with human PSMA as described in Example 24.1 and human CD3 positive T cell leukemia cell line HPB-ALL (DSMZ, Braunschweig, ACC483) were used to check the binding to human antigens. The binding reactivity to macaque antigens was tested by using the generated macaque PSMA transfectant described in Example 24.2 and a macaque T cell line 4119LnPx (kindly provided by Prof Fickenscher, Hygiene Institute, Virology, Erlangen-Nuernberg; published in Knappe A, et al., and Fickenscher H., Blood 2000, 95, 3256-61). The flow cytrometric analysis was performed in analogy to the procedure described in example 10. The binding ability of all PSMA based bispecific single chain molecules were clearly detectable as shown in FIG. 46. In the FACS analysis, all constructs showed binding to CD3 and PSMA compared to the negative control using culture medium and 1. and 2. detection antibody. In summary, the cross-species specificity of the bispecific antibody to human and macaque CD3 and to human and macaque PSMA could clearly be demonstrated.

### 24.5 Bioactivity of PSMA and CD3 Cross-Species Specific Bispecific Single Chain Antibodies

[0516] Bioactivity of the generated bispecific single chain antibodies was analyzed by chromium 51 release in vitro cytotoxicity assays using the PSMA positive cell lines described in example 24.1 and 24.2. As effector cells stimulated human CD8 positive T cells or the macaque T cell line 4119LnPx were used. The cytotoxicity assays were performed similar to the procedure described for the bioactivity analysis of the MCSP and CD3 cross-species specific bispecific antibodies in example 11.

[0517] As shown in FIGS. 47 and 48, all of the depicted cross-species specific bispecific single chain antibody constructs revealed cytotoxic activity against human PSMA positive target cells elicited by human CD8+ cells and against macaque PSMA positive target cells elicited by the macaque T cell line 4119LnPx. As a negative control, an irrelevant bispecific single chain antibody was used.

### 24.6 Generation of PSMA and CD3 Cross-Species Specific Bispecific Single Chain Molecules

[0518] Bispecific single chain antibody molecules, each comprising a domain binding to the human and to the macaque CD3 antigen as well as a domain binding to the human PSMA antigen, were designed as set out in the following Table 8:

TABLE 8
Formats of anti-CD3 and anti-PSMA cross-species specific
bispecific single chain antibody molecules

| SEQ ID NO. | Formats of protein constructs |
|---|---|
| (nucl/prot) | (N → C) |
| 610/609 | PM99-A8 HL × I2C HL |
| 624/623 | PM86-A10 HL × I2C HL |
| 638/637 | PM86-B4-2 HL × I2C HL |
| 652/651 | PM98-B4 HL × I2C HL |
| 666/665 | PM86-C3 HL × I2C HL |
| 680/679 | PM86-E12 HL × I2C HL |
| 694/693 | PMF1-A10 HL × I2C HL |
| 708/707 | PM99-F1 HL × I2C HL |
| 736/721 | PM99-F5 HL × I2C HL |
| 735/734 | PM86-F6 HL × I2C HL |
| 800/799 | PM76-A9 HL × I2C HL |
| 818/817 | PM76-B10 HL × I2C HL |
| 864/863 | PM29-G1 HL × I2C HL |
| 850/849 | PM49-B9 HL × I2C HL |
| 836/835 | PM34-C7 HL × I2C HL |
| 786/785 | PM84-D7 HL × I2C HL |
| 882/881 | PM08-B6 HL × I2C HL |
| 900/899 | PM08-E11 HL × I2C HL |
| 936/935 | PM95-A8 HL × I2C HL |
| 1018/1017 | PM26-C9 HL × I2C HL |
| 1032/1031 | PM26-H4 HL × I2C HL |
| 918/917 | PM95-H6 HL × I2C HL |
| 1004/1003 | PM07-D3 HL × I2C HL |
| 954/953 | PM07-A12 HL × I2C HL |
| 972/971 | PM07-F8 HL × I2C HL |
| 990/989 | PM07-E5 HL × I2C HL |

[0519] The aforementioned constructs each comprising a combination of a variable light-chain (L) and a variable heavy-chain (H) domain binding to the human and to the macaque CD3 antigen as well as a combination of a variable light-chain (L) and a variable heavy-chain (H) domains binding to the human PSMA antigen were obtained by gene synthesis. Each combination of a variable light-chain (L) and a variable heavy-chain (H) domains binding to the human PSMA antigen was obtained via phage display from a scFv-library by panning on the PSMA-positive human prostate cancer cell line LNCaP (ATCC No. CRL-1740) followed by FACS-based screening for positive clones using the same cell line. The gene synthesis fragments of the above listed bispecific single chain antibody molecules were designed and eukaryotic protein expression was performed in analogy to the procedure described in example 24.3, supra, respectively for the MCSP and CD3 cross-species specific single chain molecules in example 9. The same holds true for the expression and purification of the PSMA and CD3 bispecific single chain antibody molecules.

### 24.7 Flow Cytometric Binding Analysis of Psma and CD3 Cross-Species Specific Bispecific Antibodies

[0520] In order to test the functionality of cross-species specific bispecific antibody constructs regarding the capability to bind to PSMA and CD3 a FACS analysis was performed. For this purpose PSMA-positive cells were used to test the binding to human antigens. The binding reactivity to macaque CD3 was tested by using the macaque T cell line 4119LnPx (kindly provided by Prof Fickenscher, Hygiene Institute, Virology, Erlangen-Nuernberg; published in Knappe A, et al., and Fickenscher H., Blood 2000, 95, 3256-61). The flow cytrometric analysis was performed in analogy to the procedure described in example 10.

[0521] The bispecific binding of the generated single chain molecules shown in FIG. 49 and FIG. 51, to human PSMA and to human and non-chimpanzee primate CD3 was clearly detectable. In the FACS analysis all shown constructs demonstrated binding to CD3 and PSMA compared to the negative control.

### 24.8 Bioactivity of PSMA and CD3 Cross-Species Specific Bispecific Single Chain Antibodies

[0522] Bioactivity of generated bispecific single chain antibodies was analyzed by chromium 51 (⁵¹Cr) release in vitro cytotoxicity assays using PSMA positive cell lines. As effector cells stimulated human CD4/CD56 depleted PBMC or the macaque T cell line 4119LnPx were used. The cytotoxicity assays were performed similar to the procedure described for the bioactivity analysis of the MCSP and CD3 cross-species specific bispecific antibodies in example 11.

[0523] The generated cross-species specific bispecific single chain antibody constructs shown in FIGS. 50 and 52 demonstrated cytotoxic activity against PSMA positive target cells.

### 24.9. Generation of Additional PSMA and CD3 Cross-Species Specific Bispecific Single Chain Molecules

[0524] The human antibody germline VH sequence VH3 3-11 (http://vbase.mrc-cpe.cam.ac.uk/) is chosen as framework context for CDRH1 (SEQ ID NO. 394, CDRH2 (SEQ ID NO. 395) and CDRH3 (SEQ ID NO. 396). Likewise the human antibody germline VH sequence VH1 1-02 (http://vbase.mrc-cpe.cam.ac.uk/) is chosen as framework context for CDRH1 (SEQ ID NO. 408), CDRH2 (SEQ ID NO. 409) and CDRH3 (SEQ ID NO. 410) as well as the human antibody germline VH sequence VH1 1-03 (http://vbase.mrc-cpe.cam.ac.uk/) as framework context for CDRH1 (SEQ ID NO. 445), CDRH2 (SEQ ID NO. 446) and CDRH3 (SEQ ID NO. 447). For each human VH several degenerated oligonucleotides have to be synthesized that overlap in a terminal stretch of approximately 15-20 nucleotides. To this end every second primer is an antisense primer. For VH3 3-11 the following set of oligonucleotides is used:

5′PM3-VH-A-XhoI

(SEQ ID NO. 737)

CCG GAT CTC GAG TCT GGC GGC GGA CTG GTG AAG CCT
GGC GRG TCC CTG ARG CTG TCC TGT
3′PM3-VH-B

(SEQ ID NO. 738)

CCA GTA CAT GTA GTA GTC GGA GAA GGT GAA GCC GGA
GGC GRY ACA GGA CAG CYT CAG GGA
5′PM3-VH-C

(SEQ ID NO. 739)

TAC TAC ATG TAC TGG RTC CGC CAG RCC CCT GRG AAG
SGG CTG GAA TGG GTG KCC ATC ATC TCC GAC GGC
3′PM3-VH-D

(SEQ ID NO. 740)

GGC GTT GTC CCG GGA GAT GGT GAA CCG GCC CTT GAT
GAT GTC GGA GTA GTA GGT GTA GTA GCC GCC GTC GGA
GAT GAT
5′PM3-VH-E

(SEQ ID NO. 741)

TCC CGG GAC AAC GCC AAG AAC ARC CTG TAC CTG CAG
ATG ARC TCC CTG ARG KCC GAG GAC ACC GCC RTG TAC
TAC TGC RCC CGG GGC
3′PM3-VH-F-BstEII

(SEQ ID NO. 742)

CGA TAC GGT GAC CAG GGT GCC CTG GCC CCA GTA ATC
CAT GGC GCC GTG TCT CAG CAG AGG GAA GCC CCG GGY
GCA GTA GTA

[0525] For VH1 1-02 the oligonucleotides are as follows:

5′PM4-VH-A-XhoI

(SEQ ID NO. 743)

CTT GAT CTC GAG TCT GGC GCC GAA STG RWG RAG CCT
GGC GCC TCC GTG AAG STG TCC TGC AAG GCC TCC GGC
TAC
3′PM4-VH-B

(SEQ ID NO. 744)

CCA TTC CAG GCC CTG CYC AGG CSY CTG CCG CAS CCA
GTT GAT GTC GAA GTA GGT GAA GGT GTA GCC GGA GGC
CTT
5′PM4-VH-C

(SEQ ID NO. 745)

CAG GGC CTG GAA TGG ATS GGC GGC ATC TCC CCT GGC
GAC GGC AAC ACC AAC TAC AAC GAG AAC TTC AAG
3′PM4-VH-D

(SEQ ID NO. 746)

AT GTA GGC GGT GGA GMT GGA CKT GTC TMT GGT CAK TGT
GRC CYT GCC CTT GAA GTT CTC GTT GTA
5′PM4-VH-E

(SEQ ID NO. 747)

C TCC ACC GCC TAC ATS SAG CTG TCC CGG CTG ASA TCT
GAS GAC ACC GCC GTG TAC TWC TGC GCC AGG GAC GGC
3′PM4-VH-F-BstEII

(SEQ ID NO. 748)

AGA CAC GGT CAC CGT GGT GCC CTG GCC CCA AGA GTC
CAT GGC GTA GTA AGG GAA GTT GCC GTC CCT GGC GCA

[0526] For VH1 1-03 the following oligonucleotides are used:

5′PM8-VH-A-XhoI

(SEQ ID NO. 749)

CTT GAT CTC GAG TCC GGC SCT GAG STG RWG AAG CCT
GGC GCC TCC GTG AAG RTG TCC TGC AAG GCC TCC GGC
TAC
3′PM8-VH-B

(SEQ ID NO. 750)

CCA TTC CAG CMS CTG GCC GGG TKY CTG TYT CAC CCA
GTG CAT CAC GTA GCC GGT GAA GGT GTA GCC GGA GGC
CTT GCA
5′PM8-VH-C

(SEQ ID NO. 751)

CCC GGC CAG SKG CTG GAA TGG ATS GGC TAC ATC AAC
CCT TAC AAC GAC GTG ACC CGG TAC AAC GGC AAG TTC
AAG
3′PM8-VH-D

(SEQ ID NO. 752)

TTC CAT GTA GGC GGT GGA GGM GKA CKT GTC KCT GGT
AAK GGT GRC TYT GCC CTT GAA CTT GCC GTT GTA
5′PM8-VH-E

(SEQ ID NO. 753)

TCC ACC GCC TAC ATG GAA CTG TCC RGC CTG ASG TCT
GAG GAC ACC GCC GTG TAC TAC TGC GCC AGG GGC
3′PM8-VH-F-BstEII

(SEQ ID NO. 754)

CGA TAC GGT GAC CAG AGT GCC TCT GCC CCA GGA GTC
GAA GTA GTA CCA GTT CTC GCC CCT GGC GCA GTA GTA

[0527] Each of these primer-sets spans over the whole corresponding VH sequence. Within each set primers are mixed in equal amounts (e.g. 1 μl of each primer (primer stocks 20 to 100 μM) to a 20 μl PCR reaction) and added to a PCR mix consisting of PCR buffer, nucleotides and Taq polymerase. This mix is incubated at 94° C. for 3 minutes, 65° C. for 1 minute, 62° C. for 1 minute, 59° C. for 1 minute, 56° C. for 1 minute, 52° C. for 1 minute, 50° C. for 1 minute and at 72° C. for 10 minutes in a PCR cycler. Subsequently the product is run in an agarose gel electrophoresis and the product of a size from 200 to 400 isolated from the gel according to standard methods.

[0528] Each VH PCR product is then used as a template for a standard PCR reaction using primers that incorporate N-terminal and C-terminal suitable cloning restriction sites. The DNA fragment of the correct size (for a VH approximately 350 nucleotides) is isolated by agarose gel electrophoresis according to standard methods. In this way sufficient VH DNA fragment is amplified.

[0529] The human antibody germline VL sequence VkI L1 (http://vbase.mrc-cpe.cam.ac.uk/) is chosen as framework context for CDRL1 (SEQ ID NO. 389), CDRL2 (SEQ ID NO. 390) and CDRL3 (SEQ ID NO. 391). Likewise human antibody germline VL sequence VklI A17 (http://vbase.mrc-cpe.cam.ac.uk/) is chosen as framework context for CDRL1 (SEQ ID NO. 403), CDRL2 (SEQ ID NO. 404) and CDRL3 (SEQ ID NO. 405) as well as the human antibody germline VL sequence VklI A1 (http://vbase.mrc-cpe.cam.ac.uk/) as framework context for CDRL1 (SEQ ID NO. 450), CDRL2 (SEQ ID NO. 451) and CDRL3 (SEQ ID NO. 452). For each human VL several degenerated oligonucleotides have to be synthesized that overlap in a terminal stretch of approximately 15-20 nucleotides. To this end every second primer is an antisense primer. Restriction sites needed for later cloning within the oligonucleotides are deleted. For VkI L1 the following oligonucleotides are used:

5′PM3-VL-A-SacI

(SEQ ID NO. 755)

CTT GAT GAG CTC CAG ATG ACC CAG TCC CCC ARS TYC
MTG TCC RCC TCC GTG GGC GAC AGA GTG ACC
3′PM3-VL-B

(SEQ ID NO. 756)

GCC GGG CTT CTG CTG AWA CCA GGC CAC GTT GGT GTC
CAC GTT CTG GGA GGC CTT GCA GGT GAY GGT CAC TCT
GTC GCC
5′PM3-VL-C

(SEQ ID NO. 757)

CAG CAG AAG CCC GGC MAG KCC CCT AAG KCC CTG ATC
TAC TCC GCC TCC TAC CGG TAC TCT
3′PM3-VL-D

(SEQ ID NO. 758)

CAG GGT GAA GTC GGT GCC GGA CYC GGA GCC GGA GAA
CCG GKM AGG CAC GYC AGA GTA CCG GTA GGA
5′PM3-VL-E

(SEQ ID NO. 759)

ACC GAC TTC ACC CTG ACC ATC TCC ARC STG CAG YCT
GAG GAC YTC GCC RMG TAC TWC TGC CAG CAG TAC GAC
3′PM3-VL-F-BsiWI/SpeI

(SEQ ID NO. 760)

CGA GTA ACT AGT CGT ACG CTT GAT TTC CAG CTT GGT
CCC TCC GCC GAA GGT GTA AGG GTA GGA GTC GTA CTG
CTG GCA

[0530] For VklI A17 the oligonucleotides are as follows:

5′PM4-VL-A-SacI

(SEQ ID NO. 761)

CTT GAT GAG CTC GTG ATG ACC CAG TCC CCC CTG TCC
CTG CCT GTG AYC CTG GGC SAM CMG GCC TCC ATC TCC
TGC CGG
3′PM4-VL-B

(SEQ ID NO. 762)

AAA CCA GTG CAG GTA GGT ATT GCC GTT GGA GTG CAC
CAG GGA CTG GGA GGA CCG GCA GGA GAT GGA GGC
5′PM4-VL-C

(SEQ ID NO. 763)

ACC TAC CTG CAC TGG TTT CWG CAG ARG CCT GGC CAG
TCC CCT ARG CKG CTG ATC TAC ACC GTG TCC AAC CGG
3′PM4-VL-D

(SEQ ID NO. 764)

CAG GGT GAA GTC GGT GCC GGA GCC GGA GCC AGA GAA
CCT GTC AGG CAC GCC GGA GAA CCG GTT GGA CAC GGT
5′PM4-VL-E

(SEQ ID NO. 765)

GGC ACC GAC TTC ACC CTG AAG ATC TCC CGG GTG GAG
GCC GAA GAT STG GGC GTG TAC TWT TGC TCC CAG TCC
ACC
3′PM4-VL-F-BsiWI/SpeI

(SEQ ID NO. 766)

ACT CAG ACT AGT CGT ACG CTT GAT TTC CAG CTT GGT
CCC TCC GCC GAA GGT AGG CAC GTG GGT GGA CTG GGA
GCA

[0531] For VklI A1 the following oligonucleotides are used:

5′PM8-VL-A-SacI

(SEQ ID NO. 767)

CTT GAT GAG CTC GTG ATG ACC CAG TCT CCA SYC TCC
CTG SCT GTG ACT CTG GGC CAG CSG GCC TCC ATC TCT
TGC CGG
3′PM8-VL-B

(SEQ ID NO. 768)

CCA GTG CAT GAA GGT GTT GTC GTA GGA GTC GAT GGA
CTC GGA GGC CCG GCA AGA GAT GGA GGC
5′PM8-VL-C

(SEQ ID NO. 769)

ACC TTC ATG CAC TGG TWT CAG CAG ARG CCT GGC CAG
YCT CCT MRC CKG CTG ATC TWC CGG GCC TCT ATC CTG
GAA
3′PM8-VL-D

(SEQ ID NO. 770)

CAG GGT GAA GTC GGT GCC GGA GCC AGA GCC GGA GAA
CCG GKC AGG GAY GCC GGA TTC CAG GAT AGA GGC CCG
5′PM8-VL-E

(SEQ ID NO. 771)

ACC GAC TTC ACC CTG AMA ATC TMC CST GTG GAG GCC
GAS GAC GTG GSC RYC TAC TAC TGC CAC CAG
3′PM8-VL-F-BsiWI/SpeI

(SEQ ID NO. 772)

ACT CAG ACT AGT CGT ACG CTT GAT TTC CAG CTT GGT
CCC TCC GCC GAA GGT GTA AGG GTC CTC GAT GGA CTG
GTG GCA GTA GTA

[0532] Each of these primer-sets spans over the whole corresponding VL sequence. Within each set primers are mixed in equal amounts (e.g. 1 μl of each primer (primer stocks 20 to 100 μM) to a 20 μl PCR reaction) and added to a PCR mix consisting of PCR buffer, nucleotides and Taq polymerase. This mix is incubated at 94° C. for 3 minutes, 65° C. for 1 minute, 62° C. for 1 minute, 59° C. for 1 minute, 56° C. for 1 minute, 52° C. for 1 minute, 50° C. for 1 minute and at 72° C. for 10 minutes in a PCR cycler. Subsequently the product is run in an agarose gel electrophoresis and the product of a size from 200 to 400 isolated from the gel according to standard methods.

[0533] Each VL PCR product is then used as a template for a standard PCR reaction using primers that incorporate N-terminal and C-terminal suitable cloning restriction sites. The DNA fragment of the correct size (for a VL approximately 330 nucleotides) is isolated by agarose gel electrophoresis according to standard methods. In this way sufficient VL DNA fragment is amplified.

[0534] The final VH3 3-11-based VH PCR product (i.e. the repertoire of human/humanized VH) is then combined with the final VkI L1-based VL PCR product (i.e. the repertoire of human/humanized VL), the final VH1 1-02-based VH PCR product (i.e. the repertoire of human/humanized VH) is combined with the final VklI A17-based VL PCR product (i.e. the repertoire of human/humanized VL) and the final VH1 1-03-based VH PCR product (i.e. the repertoire of human/humanized VH) is combined with the final VklI A1-based VL PCR product (i.e. the repertoire of human/humanized VL) in the phage display vector pComb3H₅Bhis, respectively. These three VH-VL combinations form three different libraries of functional scFvs from which—after display on filamentous phage—anti-PSMA binders are selected, screened, identified and confirmed as described in the following:

[0535] 450 ng of the light chain fragments (SacI-SpeI digested) are ligated with 1400 ng of the phagemid pComb3H5Bhis (SacI-SpeI digested; large fragment). The resulting combinatorial antibody library is then transformed into 300 ul of electrocompetent Escherichia coli XL1 Blue cells by electroporation (2.5 kV, 0.2 cm gap cuvette, 25 uFD, 200 Ohm, Biorad gene-pulser) resulting in a library size of more than 10⁷ independent clones. After one hour of phenotype expression, positive transformants are selected for carbenicilline resistance encoded by the pComb3H5BHis vector in 100 ml of liquid super broth (SB)-culture over night. Cells are then harvested by centrifugation and plasmid preparation is carried out using a commercially available plasmid preparation kit (Qiagen).

[0536] 2800 ng of this plasmid-DNA containing the VL-library (XhoI-BstEII digested; large fragment) are ligated with 900 ng of the heavy chain V-fragments (XhoI-BstEII digested) and again transformed into two 300 ul aliquots of electrocompetent E. coli XL1 Blue cells by electroporation (2.5 kV, 0.2 cm gap cuvette, 25 uFD, 200 Ohm) resulting in a total VH-VL scFv (single chain variable fragment) library size of more than 10⁷ independent clones.

[0537] After phenotype expression and slow adaptation to carbenicilline, the E. coli cells containing the antibody library are transferred into SB-carbenicilline (SB with 50 ug/mL carbenicilline) selection medium. The E. coli cells containing the antibody library is then infected with an infectious dose of 10¹² particles of helper phage VCSM13 resulting in the production and secretion of filamentous M13 phage, wherein phage particle contains single stranded pComb3H₅BHis-DNA encoding a scFv-fragment and displayed the corresponding scFv-protein as a translational fusion to phage coat protein III. This pool of phages displaying the antibody library is used for the selection of antigen binding entities.

[0538] For this purpose the phage library carrying the cloned scFv-repertoire is harvested from the respective culture supernatant by PEG8000/NaCl precipitation and centrifugation. Approximately 10¹¹ to 10¹² scFv phage particles are resuspended in 0.4 ml of PBS/0.1% BSA and incubated with 10⁵ to 10⁷ PSMA-positive human prostate cancer cell line LNCaP (ATCC No. CRL-1740) for 1 hour on ice under slow agitation. These LNCaP cells are harvested beforehand by centrifugation, washed in PBS and resuspended in PBS/1% FCS (containing 0.05% Na Azide). scFv phage which do not specifically bind to LNCaP cells are eliminated by up to five washing steps with PBS/1% FCS (containing 0.05% Na Azide). After washing, binding entities are eluted from the cells by resuspending the cells in HCl-glycine pH 2.2 (10 min incubation with subsequent vortexing) and after neutralization with 2 M Tris pH 12, the eluate is used for infection of a fresh uninfected E. coli XL1 Blue culture (OD600>0.5). The E. coli culture containing E. coli cells successfully transduced with a phagemid copy, encoding a human/humanized scFv-fragment, are again selected for carbenicilline resistance and subsequently infected with VCMS 13 helper phage to start the second round of antibody display and in vitro selection. A total of 4 to 5 rounds of selections are carried out, normally.

[0539] In order to screen for PSMA specific binders plasmid DNA corresponding to 4 and 5 rounds of panning is isolated from E. coli cultures after selection. For the production of soluble scFv-protein, VH-VL-DNA fragments are excised from the plasmids (XhoI-SpeI). These fragments are cloned via the same restriction sites into the plasmid pComb3H₅BFlag/His differing from the original pComb3H5BHis in that the expression construct (e.g. scFv) includes a Flag-tag (DYKDDDDK) between the scFv and the His6-tag and the additional phage proteins are deleted. After ligation, each pool (different rounds of panning) of plasmid DNA is transformed into 100 μl heat shock competent E. coli TG1 or XLI blue and plated onto carbenicilline LB-agar. Single colonies are picked into 100 μl of LB carb (50 ug/ml carbenicilline).

[0540] E. coli transformed with pComb3H₅BFlag/His containing a VL- and VH-segment produce soluble scFv in sufficient amounts after induction with 1 mM IPTG. Due to a suitable signal sequence, the scFv-chain is exported into the periplasma where it folds into a functional conformation.

[0541] Single E. coli TG1 bacterial colonies from the transformation plates are picked for periplasmic small scale preparations and grown in SB-medium (e.g. 10 ml) supplemented with 20 mM MgCl₂ and carbenicilline 50 μg/ml (and re-dissolved in PBS (e.g. 1 ml) after harvesting. By four rounds of freezing at −70° C. and thawing at 37° C., the outer membrane of the bacteria is destroyed by temperature shock and the soluble periplasmic proteins including the scFvs are released into the supernatant. After elimination of intact cells and cell-debris by centrifugation, the supernatant containing the anti-PSMA scFvs is collected and used for the identification of PSMA specific binders as follows:

[0542] Binding of scFvs to PSMA is tested by flow cytometry on the PSMA-positive human prostate cancer cell line LNCaP (ATCC No. CRL-1740). A periplasmic small scale preparation as described above without any grown bacteria is used as negative control.

[0543] For flow cytometry 2.5×10⁵ cells are incubated with 50 ul of scFv periplasmic preparation or with 5 μg/ml of purified scFv in 50 μl PBS with 2% FCS. The binding of scFv is detected with an anti-His antibody (Penta-His Antibody, BSA free, Qiagen GmbH, Hilden, FRG) at 2 μg/ml in 50 μl PBS with 2% FCS. As a second step reagent a R-Phycoerythrin-conjugated affinity purified F(ab′)2 fragment, goat anti-mouse IgG (Fc-gamma fragment specific), diluted 1:100 in 50 μl PBS with 2% FCS (Dianova, Hamburg, FRG) is used. The samples are measured on a FACSscan (BD biosciences, Heidelberg, FRG).

[0544] Single clones are then analyzed for favourable properties and amino acid sequence. PSMA specific scFvs are converted into recombinant bispecific single chain antibodies by joining them via a Gly₄Ser₁-linker with the CD3 specific scFv I2C (SEQ ID 185) or any other CD3 specific scFv of the invention to result in constructs with the domain arrangement VH_{PSMA}-(Gly₄Ser₁)₃-VL_{PSMA}-Gly₄Ser₁-VH_{CD3}-(Gly₄Ser₁)₃-VL_{CD3} or VL_{PSMA}-(Gly₄Ser₁)₃-VH_{PSMA}-Gly₄Ser₁-VH_{CD3}-(Gly₄Ser₁)₃-VL_{CD3} or alternative domain arrangements. For expression in CHO cells the coding sequences of (i) an N-terminal immunoglobulin heavy chain leader comprising a start codon embedded within a Kozak consensus sequence and (ii) a C-terminal His₆-tag followed by a stop codon are both attached in frame to the nucleotide sequence encoding the bispecific single chain antibodies prior to insertion of the resulting DNA-fragment as obtained by gene synthesis into the multiple cloning site of the expression vector pEF-DHFR (Raum et al. Cancer Immunol Immunother 50 (2001) 141-150). Transfection of the generated expression plasmids, protein expression and purification of cross-species specific bispecific antibody constructs are performed as described in chapters 24.6 and 24.7 of this example. All other state of the art procedures are carried out according to standard protocols (Sambrook, Molecular Cloning; A Laboratory Manual, 3rd edition, Cold Spring Harbour Laboratory Press, Cold Spring Harbour, New York (2001)).

[0545] Identification of functional bispecific single-chain antibody constructs is carried out by flow cytometric binding analysis of culture supernatant from transfected cells expressing the cross-species specific bispecific antibody constructs. The flowcytometric analysis is perfomed on the human PSMA positive prostate cancer cell line LNCaP (ATCC No. CRL-1740) as described in chapter 24.7 of this example. Only those constructs showing bispecific binding to human and macaque CD3 as well as to PSMA are selected for further use.

[0546] Cytotoxic activity of the generated cross-species specific bispecific single chain antibody constructs against PSMA positive target cells elicited by effector T cells is analyzed as described in chapter 24.8 of this example. The human PSMA positive prostate cancer cell line LNCaP (ATCC No. CRL-1740) is used as source of target cells. Only those constructs showing potent recruitment of cytotoxic activity of effector T cells against target cells positive for PSMA are selected for further use.

### 25. Epitope Mapping of PSMA and CD3 Cross-Species Specific Bispecific Single Chain Antibody Molecules

### 25.1 Generation of CHO Cells Expressing Human/Rat PSMA Chimeras

[0547] For mapping of the binding epitopes of PSMA cross-species specific bispecific single chain antibody molecules, chimeric PSMA proteins were generated with PSMA from two different species. This approach requires that only the PSMA protein from one species is recognized by the antibody. Here, PSMA of rattus norvegicus, which is not bound by the tested PSMA cross-species specific bispecific single chain antibody molecules, was used for making chimera with human PSMA. Therefore creating a chimera in the region containing the binding epitope of a PSMA cross-species specific bispecific single chain antibody leads to loss of binding of said single chain antibody to the respective PSMA construct.

[0548] The coding sequence of human PSMA as published in GenBank (Accession number NM_{—}004476) and the coding sequence of rat PSMA (NM_{—}057185, Rattus norvegicus folate hydrolase (Folh1), mRNA, National Center for Biotechnology Information, http://www.ncbi.nlm.nih.gov/entrez) were used for generation of the chimeric constructs.

[0549] A set of 7 chimeric cDNA constructs was designed and generated by gene synthesis according to standard protocols. In the constructs segments of the coding sequences for the amino acids 140 to 169, 191 to 258, 281 to 284, 300 to 344, 589 to 617, 683 to 690 and 716 to 750, respectively, were exchanged for the homologous sequences of rat PSMA.

[0550] Chimeric PSMA constructs were generated as described above and designated as set out in the following Table 9:

TABLE 9
Designation of chimeric PSMA constructs

| SEQ ID | |
|---|---|
| (nucl/prot) | Designation |
| 1033/1034 | huPSMArat140-169 |
| 1035/1036 | huPSMArat191-258 |
| 1037/1038 | huPSMArat281-284 |
| 1039/1040 | huPSMArat300-344 |
| 1041/1042 | huPSMArat598-617 |
| 1043/1044 | huPSMArat683-690 |
| 1045/1046 | huPSMArat716-750 |

[0551] The gene synthesis fragments were designed as to contain first a Kozak site for eukaryotic expression of the construct followed by the coding sequence of the chimeric PSMA proteins, followed in frame by the coding sequence of a FLAG-tag and a stop codon. The gene synthesis fragments were also designed as to introduce restriction sites at the beginning and at the end of the fragments. The introduced restriction sites, EcoRI at the 5′ end and SalI at the 3′ end, were utilized in the following cloning procedures. Undesirable internal restriction sites were removed by silent mutation of the coding sequence in the gene synthesis fragments. The gene synthesis fragments were cloned via EcoRI and SalI into a plasmid designated pEF-DHFR (pEF-DHFR is described in Raum et al. Cancer Immunol Immunother 50 (2001) 141-150) following standard protocols. The aforementioned procedures were carried out according to standard protocols (Sambrook, Molecular Cloning; A Laboratory Manual, 3rd edition, Cold Spring Harbour Laboratory Press, Cold Spring Harbour, New York (2001)). A clone with sequence-verified nucleotide sequence was transfected into DHFR deficient CHO cells for eukaryotic expression of the construct. Eukaryotic protein expression in DHFR deficient CHO cells was performed as described by Kaufmann R. J. (1990) Methods Enzymol. 185, 537-566. Gene amplification of the construct was induced by increasing concentrations of methotrexate (MTX) to a final concentration of up to 20 nM MTX.

### 25.2 Flow Cytometric Binding Analysis for Epitope Mapping of PSMA and CD3 Cross-Species Specific Bispecific Single Chain Antibody Molecules Using Chimeric PSMA Proteins

[0552] In order to determine the binding epitope of PSMA cross-species specific bispecific single chain antibody constructs a FACS analysis was performed. For this purpose CHO cells transfected with human/rat chimeric PSMA molecules as described in Example 25.1 were used. FACS analysis with supernatant of CHO cells expressing bispecific single chain antibody constructs was performed as described herein. Detection of binding of PSMA cross-species specific bispecific single chain antibody constructs was performed using a murine Penta His antibody and as second step reagent an Fc gamma-specific antibody conjugated to phycoerythrin. Supernatant of untransfected cells was used as a negative control.

[0553] As shown in FIG. 53 all PSMA cross-species specific bispecific single chain antibody constructs tested showed binding to the chimeric constructs huPSMArat140-169, huPSMArat191-258, huPSMArat281-284, huPSMArat683-690 and huPSMArat716-750. As furthermore shown in FIG. 53 there is a lack of binding for the PSMA cross-species specific bispecific single chain antibody constructs PM84-D 7×I2C, PM29-G1×I2C and PM49-B9×I2C to the construct huPSMArat300-344, which demonstrates the presence of a major binding epitope for these constructs in the region of amino acids 300 to 344 of human PSMA. As also shown in FIG. 53 there is a lack of binding for the PSMA cross-species specific bispecific single chain antibody construct PM34-C7×I2C to the construct huPSMArat598-617, which demonstrates the presence of a major binding epitope for this construct in the region of amino acids 598 to 617 of human PSMA.

### 26 Epitope Mapping Using a Peptide Scanning Approach

[0554] The two PSMA BiTE antibodies PM 76-B10×I2C and PM 76-A9×I2C were cross-reactive with rat PSMA, which excluded them from mapping by using human-rat PSMA chimeras. Likewise, binding signals of PSMA BiTE antibody PM F1-A10×I2C on human-rat PSMA chimeras were too weak for reliable epitope mapping. These three PSMA BiTE antibodies were subjected to an alternative epitope mapping approach based on peptide scanning (Pepscan). Pepscan uses overlapping peptides of a given protein and analyses antibody binding to immobilized peptides by enzyme-linked immunosorbent assays (ELISAs). The epitope mapping experiments with PSMA BiTE antibodies were performed at the company Pepscan (Lelystad, The Netherlands). A detailed description of the method is found elsewhere (Bernard et al. 2004, J. Biol. Chem., 279: 24313-22; Teeling et al. 2006, J. Immunol., 177: 362-71). In brief, 693 different 15-mer peptides were synthesized that span the entire extracellular amino acid sequence of human PSMA and overlap with each neighbouring 15-mer peptide by 14 amino acids. These peptides were coated to ELISA wells in a 384-well plate format. For this series of experiments, anti-PSMA scFvs of the respective BiTE antibody candidates (scFv MP 9076-A9 for BiTE antibody PM 76-A9×I2C; scFv MP 9076-B10 for BiTE antibody PM 76-B10×I2C; scFv F1-A10 for BiTE antibody PM F1-A10×I2C) were produced in E. coli and used for ELISA as crude periplasmic extracts. To this end 7 ml of crude periplasmic extracts were shipped on dry ice to Pepscan (The Netherlands). Using scFv counterparts in this assay minimized the risk to pick up signals from the second non-PSMA binding specificity of the BiTE antibodies, which may lead to misinterpretation of the PSMA binding epitopes of the target binders. The scFvs were incubated with the peptides and specific binding detected using an anti-His antibody. Binding signals were measured in a 384-well ELISA reader. Results are shown in FIGS. 54, 55 and 56.

[0555] Of the three anti-PSMA scFv antibodies used to generate PSMA BiTE antibodies (scFv MP 9076-A9 for BiTE antibody PM 76-A9×I2C; scFv MP 9076-B10 for BiTE antibody PM 76-B10×I2C; scFv F1-A10 for BiTE antibody PM F1-A10×I2C) apparently two (MP 9076-A9 and MP 9076-B10) bound to a similar dominant epitope of human PSMA. This finding is supported by the close homology of the two scFv antibodies and sequence identity in their six CDRs. The peptide binding signals point to a core epitope between Thr334 to Thr339. This sequence is located in an exposed loop of the apical domain of human PSMA as is shown in FIG. 57. For scFv F1-A10, a dominant epitope could be detected within the sequence LFEPPPPGYENVS (amino acids 143-155 of human PSMA), which is also localized in the apical domain. The strong binding of the three antibody fragments MP 9076-A9. MP9076-B10 and F1-A10 to discrete peptides indicates recognition of a linear protein epitope rather than a carbohydrate moiety.

| | | | | |
|---|---|---|---|---|
| SEQ | | | | |
| ID NO. | DESIGNATION | SOURCE | TYPE | SEQUENCE |

| | | | | |
|---|---|---|---|---|
| 1. | Human | human | aa | QDGNEEMGGITQTPYKVSISGTTVILTCPQYPGSEILWQHNDKNIGGDEDDKNIGSDEDHLSLKE |
| | CD3ε | | | FSELEQSGYYVCYPRGSKPEDANFYLYLRARVCENCMEMD |
| | extracellular | | | |
| | domain | | | |
| 2. | Human | human | aa | QDGNEEMGGITQTPYKVSISGTTVILT |
| | CD3ε 1-27 | | | |
| 3. | Callithrix | Callithrix | aa | QDGNEEMGDTTQNPYKVSISGTTVTLTCPRYDGHEIKWLVNSQNKEGHEDHLLLEDFSEMEQSGY |
| | jacchus | jacchus | | YACLSKETPAEEASHYLYLKARVCENCVEVD |
| | CD3ε | | | |
| | extracellular | | | |
| | domain | | | |
| 4. | Callithrix | Callithrix | aa | QDGNEEMGDTTQNPYKVSISGTTVTLT |
| | jacchus | jacchus | | |
| | CD3ε 1-27 | | | |
| 5. | Saguinus | Saguinus | aa | QDGNEEMGDTTQNPYKVSISGTTVTLTCPRYDGHEIKWLVNSQNKEGHEDHLLLEDFSEMEQSGY |
| | oedipus | oedipus | | YACLSKETPAEEASHYLYLKARVCENCVEVD |
| | CD3ε | | | |
| | extracellular | | | |
| | domain | | | |
| 6. | Saguinus | Saguinus | aa | QDGNEEMGDTTQNPYKVSISGTTVTLT |
| | oedipus | oedipus | | |
| | CD3ε 1-27 | | | |
| 7. | Saimiri | Saimiri | aa | QDGNEEIGDTTQNPYKVSISGTTVTLTCPRYDGQEIKWLVNDQNKEGHEDHLLLEDFSEMEQSGY |
| | sciureus | sciureus | | YACLSKETPTEEASHYLYLKARVCENCVEVD |
| | CD3ε | | | |
| | extracellular | | | |
| | domain | | | |
| 8. | Saimiri | Saimiri | aa | QDGNEEIGDTTQNPYKVSISGTTVTLT |
| | sciureus | sciureus | | |
| | CD3ε 1-27 | | | |
| 9. | CDR-L1 of F6A | artificial | aa | GSSTGAVTSGYYPN |
| 10. | CDR-L2 of F6A | artificial | aa | GTKFLAP |
| 11. | CDR-L3 of F6A | artificial | aa | ALWYSNRWV |
| 12. | CDR-H1 of F6A | artificial | aa | IYAMN |
| 13. | CDR-H2 of F6A | artificial | aa | RIRSKYNNYATYYADSVKS |
| 14. | CDR-H3 of F6A | artificial | aa | HGNFGNSYVSFFAY |
| 15. | VH of F6A | artificial | aa | EVQLVESGGGLVQPGGSLKLSCAASGFTFNIYAMNWVRQAPGKGLEWVARIRSKYNNYATYYADS |
| | | | | VKSRFTISRDDSKNTAYLQMNNLKTEDTAVYYCVRHGNFGNSYVSFFAYWGQGTLVTVSS |
| 16. | VH of F6A | artificial | nt | GAGGTGCAGCTGGTCGAGTCTGGAGGAGGATTGGTGCAGCCTGGAGGGTCATTGAAACTCTCATG |
| | | | | TGCAGCCTCTGGATTCACCTTCAATATCTACGCCATGAACTGGGTCCGCCAGGCTCCAGGAAAGG |
| | | | | GTTTGGAATGGGTTGCTCGCATAAGAAGTAAATATAATAATTATGCAACATATTATGCCGATTCA |
| | | | | GTGAAAAGCAGGTTCACCATCTCCAGAGATGATTCAAAAAACACTGCCTATCTACAAATGAACAA |
| | | | | CTTGAAAACTGAGGACACTGCCGTGTACTACTGTGTGAGACATGGGAACTTCGGTAATAGCTACG |
| | | | | TATCCTTCTTCGCTTACTGGGGCCAAGGGACTCTGGTCACCGTCTCCTCA |
| 17. | VL of F6A | artificial | aa | QTVVTQEPSLTVSPGGTVTLTCGSSTGAVTSGYYPNWVQQKPGQAPRGLIGGTKFLAPGTPARFS |
| | | | | GSLLGGKAALTLSGVQPEDEAEYYCALWYSNRWVFGGGTKLTVL |
| 18. | VL of F6A | artificial | nt | CAGACTGTTGTGACTCAGGAACCTTCACTCACCGTATCACCTGGTGGAACAGTCACACTCACTTG |
| | | | | TGGCTCCTCGACTGGGGCTGTTACATCTGGCTACTACCCAAACTGGGTCCAACAAAAACCAGGTC |
| | | | | AGGCACCCCGTGGTCTAATAGGTGGGACTAAGTTCCTCGCCCCCGGTACTCCTGCCAGATTCTCA |
| | | | | GGCTCCCTGCTTGGAGGCAAGGCTGCCCTCACCCTCTCAGGGGTACAGCCAGAGGATGAGGCAGA |
| | | | | ATATTACTGTGCTCTATGGTACAGCAACCGCTGGGTGTTCGGTGGAGGAACCAAACTGACTGTCC |
| | | | | TA |
| 19. | VH-P of F6A | artificial | aa | EVQLLESGGGLVQPGGSLKLSCAASGFTFNIYAMNWVRQAPGKGLEWVARIRSKYNNYATYYADS |
| | | | | VKSRFTISRDDSKNTAYLQMNNLKTEDTAVYYCVRHGNFGNSYVSFFAYWGQGTLVTVSS |
| 20. | VH-P of F6A | artificial | nt | GAGGTGCAGCTGCTCGAGTCTGGAGGAGGATTGGTGCAGCCTGGAGGGTCATTGAAACTCTCATG |
| | | | | TGCAGCCTCTGGATTCACCTTCAATATCTACGCCATGAACTGGGTCCGCCAGGCTCCAGGAAAGG |
| | | | | GTTTGGAATGGGTTGCTCGCATAAGAAGTAAATATAATAATTATGCAACATATTATGCCGATTCA |
| | | | | GTGAAAAGCAGGTTCACCATCTCCAGAGATGATTCAAAAAACACTGCCTATCTACAAATGAACAA |
| | | | | CTTGAAAACTGAGGACACTGCCGTGTACTACTGTGTGAGACATGGGAACTTCGGTAATAGCTACG |
| | | | | TATCCTTCTTCGCTTACTGGGGCCAAGGGACTCTGGTCACCGTCTCCTCA |
| 21. | VL-P of F6A | artificial | aa | ELVVTQEPSLTVSPGGTVTLTCGSSTGAVTSGYYPNWVQQKPGQAPRGLIGGTKFLAPGTPARFS |
| | | | | GSLLGGKAALTLSGVQPEDEAEYYCALWYSNRWVFGGGTKLTVL |
| 22. | VL-P of F6A | artificial | nt | GAGCTCGTTGTGACTCAGGAACCTTCACTCACCGTATCACCTGGTGGAACAGTCACACTCACTTG |
| | | | | TGGCTCCTCGACTGGGGCTGTTACATCTGGCTACTACCCAAACTGGGTCCAACAAAAACCAGGTC |
| | | | | AGGCACCCCGTGGTCTAATAGGTGGGACTAAGTTCCTCGCCCCCGGTACTCCTGCCAGATTCTCA |
| | | | | GGCTCCCTGCTTGGAGGCAAGGCTGCCCTCACCCTCTCAGGGGTACAGCCAGAGGATGAGGCAGA |
| | | | | ATATTACTGTGCTCTATGGTACAGCAACCGCTGGGTGTTCGGTGGAGGAACCAAACTGACTGTCC |
| | | | | TA |
| 23. | VH-VL of F6A | artificial | aa | EVQLVESGGGLVQPGGSLKLSCAASGFTFNIYAMNWVRQAPGKGLEWVARIRSKYNNYATYYADS |
| | | | | VKSRFTISRDDSKNTAYLQMNNLKTEDTAVYYCVRHGNFGNSYVSFFAYWGQGTLVTVSSGGGGS |
| | | | | GGGGSGGGGSQTVVTQEPSLTVSPGGTVTLTCGSSTGAVTSGYYPNWVQQKPGQAPRGLIGGTKF |
| | | | | LAPGTPARFSGSLLGGKAALTLSGVQPEDEAEYYCALWYSNRWVFGGGTKLTVL |
| 24. | VH-VL of F6A | artificial | nt | GAGGTGCAGCTGGTCGAGTCTGGAGGAGGATTGGTGCAGCCTGGAGGGTCATTGAAACTCTCATG |
| | | | | TGCAGCCTCTGGATTCACCTTCAATATCTACGCCATGAACTGGGTCCGCCAGGCTCCAGGAAAGG |
| | | | | GTTTGGAATGGGTTGCTCGCATAAGAAGTAAATATAATAATTATGCAACATATTATGCCGATTCA |
| | | | | GTGAAAAGCAGGTTCACCATCTCCAGAGATGATTCAAAAAACACTGCCTATCTACAAATGAACAA |
| | | | | CTTGAAAACTGAGGACACTGCCGTGTACTACTGTGTGAGACATGGGAACTTCGGTAATAGCTACG |
| | | | | TATCCTTCTTCGCTTACTGGGGCCAAGGGACTCTGGTCACCGTCTCCTCAGGTGGTGGTGGTTCT |
| | | | | GGCGGCGGCGGCTCCGGTGGTGGTGGTTCTCAGACTGTTGTGACTCAGGAACCTTCACTCACCGT |
| | | | | ATCACCTGGTGGAACAGTCACACTCACTTGTGGCTCCTCGACTGGGGCTGTTACATCTGGCTACT |
| | | | | ACCCAAACTGGGTCCAACAAAAACCAGGTCAGGCACCCCGTGGTCTAATAGGTGGGACTAAGTTC |
| | | | | CTCGCCCCCGGTACTCCTGCCAGATTCTCAGGCTCCCTGCTTGGAGGCAAGGCTGCCCTCACCCT |
| | | | | CTCAGGGGTACAGCCAGAGGATGAGGCAGAATATTACTGTGCTCTATGGTACAGCAACCGCTGGG |
| | | | | TGTTCGGTGGAGGAACCAAACTGACTGTCCTA |
| 25. | VH-VL-P of | artificial | aa | EVQLLESGGGLVQPGGSLKLSCAASGFTFNIYAMNWVRQAPGKGLEWVARIRSKYNNYATYYADS |
| | F6A | | | VKSRFTISRDDSKNTAYLQMNNLKTEDTAVYYCVRHGNFGNSYVSFFAYWGQGTLVTVSSGGGGS |
| | | | | GGGGSGGGGSELVVTQEPSLTVSPGGTVTLTCGSSTGAVTSGYYPNWVQQKPGQAPRGLIGGTKF |
| | | | | LAPGTPARFSGSLLGGKAALTLSGVQPEDEAEYYCALWYSNRWVFGGGTKLTVL |
| 26. | VH-VL-P of | artificial | nt | GAGGTGCAGCTGCTCGAGTCTGGAGGAGGATTGGTGCAGCCTGGAGGGTCATTGAAACTCTCATG |
| | F6A | | | TGCAGCCTCTGGATTCACCTTCAATATCTACGCCATGAACTGGGTCCGCCAGGCTCCAGGAAAGG |
| | | | | GTTTGGAATGGGTTGCTCGCATAAGAAGTAAATATAATAATTATGCAACATATTATGCCGATTCA |
| | | | | GTGAAAAGCAGGTTCACCATCTCCAGAGATGATTCAAAAAACACTGCCTATCTACAAATGAACAA |
| | | | | CTTGAAAACTGAGGACACTGCCGTGTACTACTGTGTGAGACATGGGAACTTCGGTAATAGCTACG |
| | | | | TATCCTTCTTCGCTTACTGGGGCCAAGGGACTCTGGTCACCGTCTCCTCAGGTGGTGGTGGTTCT |
| | | | | GGCGGCGGCGGCTCCGGTGGTGGTGGTTCTGAGCTCGTTGTGACTCAGGAACCTTCACTCACCGT |
| | | | | ATCACCTGGTGGAACAGTCACACTCACTTGTGGCTCCTCGACTGGGGCTGTTACATCTGGCTACT |
| | | | | ACCCAAACTGGGTCCAACAAAAACCAGGTCAGGCACCCCGTGGTCTAATAGGTGGGACTAAGTTC |
| | | | | CTCGCCCCCGGTACTCCTGCCAGATTCTCAGGCTCCCTGCTTGGAGGCAAGGCTGCCCTCACCCT |
| | | | | CTCAGGGGTACAGCCAGAGGATGAGGCAGAATATTACTGTGCTCTATGGTACAGCAACCGCTGGG |
| | | | | TGTTCGGTGGAGGAACCAAACTGACTGTCCTA |
| 27. | CDR-L1 of H2C | artificial | aa | GSSTGAVTSGYYPN |
| 28. | CDR-L2 of H2C | artificial | aa | GTKFLAP |
| 29. | CDR-L3 of H2C | artificial | aa | ALWYSNRWV |
| 30. | CDR-H1 of H2C | artificial | aa | KYAMN |
| 31. | CDR-H2 of H2C | artificial | aa | RIRSKYNNYATYYADSVKD |
| 32. | CDR-H3 of H2C | artificial | aa | HGNFGNSYISYWAY |
| 33. | VH of H2C | artificial | aa | EVQLVESGGGLVQPGGSLKLSCAASGFTFNKYAMNWVRQAPGKGLEWVARIRSKYNNYATYYADS |
| | | | | VKDRFTISRDDSKNTAYLQMNNLKTEDTAVYYCVRHGNFGNSYISYWAYWGQGTLVTVSS |
| 34. | VH of H2C | artificial | nt | GAGGTGCAGCTGGTCGAGTCTGGAGGAGGATTGGTGCAGCCTGGAGGGTCATTGAAACTCTCATG |
| | | | | TGCAGCCTCTGGATTCACCTTCAATAAGTACGCCATGAACTGGGTCCGCCAGGCTCCAGGAAAGG |
| | | | | GTTTGGAATGGGTTGCTCGCATAAGAAGTAAATATAATAATTATGCAACATATTATGCCGATTCA |
| | | | | GTGAAAGACAGGTTCACCATCTCCAGAGATGATTCAAAAAACACTGCCTATCTACAAATGAACAA |
| | | | | CTTGAAAACTGAGGACACTGCCGTGTACTACTGTGTGAGACATGGGAACTTCGGTAATAGCTACA |
| | | | | TATCCTACTGGGCTTACTGGGGCCAAGGGACTCTGGTCACCGTCTCCTCA |
| 35. | VL of H2C | artificial | aa | QTVVTQEPSLTVSPGGTVTLTCGSSTGAVTSGYYPNWVQQKPGQAPRGLIGGTKFLAPGTPARFS |
| | | | | GSLLGGKAALTLSGVQPEDEAEYYCALWYSNRWVFGGGTKLTVL |
| 36. | VL of H2C | artificial | nt | CAGACTGTTGTGACTCAGGAACCTTCACTCACCGTATCACCTGGTGGAACAGTCACACTCACTTG |
| | | | | TGGCTCCTCGACTGGGGCTGTTACATCTGGCTACTACCCAAACTGGGTCCAACAAAAACCAGGTC |
| | | | | AGGCACCCCGTGGTCTAATAGGTGGGACTAAGTTCCTCGCCCCCGGTACTCCTGCCAGATTCTCA |
| | | | | GGCTCCCTGCTTGGAGGCAAGGCTGCCCTCACCCTCTCAGGGGTACAGCCAGAGGATGAGGCAGA |
| | | | | ATATTACTGTGCTCTATGGTACAGCAACCGCTGGGTGTTCGGTGGAGGAACCAAACTGACTGTCC |
| | | | | TA |
| 37. | VH-P of H2C | artificial | aa | EVQLLESGGGLVQPGGSLKLSCAASGFTFNKYAMNWVRQAPGKGLEWVARIRSKYNNYATYYADS |
| | | | | VKDRFTISRDDSKNTAYLQMNNLKTEDTAVYYCVRHGNFGNSYISYWAYWGQGTLVTVSS |
| 38. | VH-P of H2C | artificial | nt | GAGGTGCAGCTGCTCGAGTCTGGAGGAGGATTGGTGCAGCCTGGAGGGTCATTGAAACTCTCATG |
| | | | | TGCAGCCTCTGGATTCACCTTCAATAAGTACGCCATGAACTGGGTCCGCCAGGCTCCAGGAAAGG |
| | | | | GTTTGGAATGGGTTGCTCGCATAAGAAGTAAATATAATAATTATGCAACATATTATGCCGATTCA |
| | | | | GTGAAAGACAGGTTCACCATCTCCAGAGATGATTCAAAAAACACTGCCTATCTACAAATGAACAA |
| | | | | CTTGAAAACTGAGGACACTGCCGTGTACTACTGTGTGAGACATGGGAACTTCGGTAATAGCTACA |
| | | | | TATCCTACTGGGCTTACTGGGGCCAAGGGACTCTGGTCACCGTCTCCTCA |
| 39. | VL-P of H2C | artificial | aa | ELVVTQEPSLTVSPGGTVTLTCGSSTGAVTSGYYPNWVQQKPGQAPRGLIGGTKFLAPGTPARFS |
| | | | | GSLLGGKAALTLSGVQPEDEAEYYCALWYSNRWVFGGGTKLTVL |
| 40. | VL-P of H2C | artificial | nt | GAGCTCGTTGTGACTCAGGAACCTTCACTCACCGTATCACCTGGTGGAACAGTCACACTCACTTG |
| | | | | TGGCTCCTCGACTGGGGCTGTTACATCTGGCTACTACCCAAACTGGGTCCAACAAAAACCAGGTC |
| | | | | AGGCACCCCGTGGTCTAATAGGTGGGACTAAGTTCCTCGCCCCCGGTACTCCTGCCAGATTCTCA |
| | | | | GGCTCCCTGCTTGGAGGCAAGGCTGCCCTCACCCTCTCAGGGGTACAGCCAGAGGATGAGGCAGA |
| | | | | ATATTACTGTGCTCTATGGTACAGCAACCGCTGGGTGTTCGGTGGAGGAACCAAACTGACTGTCC |
| | | | | TA |
| 41. | VH-VL of H2C | artificial | aa | EVQLVESGGGLVQPGGSLKLSCAASGFTFNKYAMNWVRQAPGKGLEWVARIRSKYNNYATYYADS |
| | | | | VKDRFTISRDDSKNTAYLQMNNLKTEDTAVYYCVRHGNFGNSYISYWAYWGQGTLVTVSSGGGGS |
| | | | | GGGGSGGGGSQTVVTQEPSLTVSPGGTVTLTCGSSTGAVTSGYYPNWVQQKPGQAPRGLIGGTKF |
| | | | | LAPGTPARFSGSLLGGKAALTLSGVQPEDEAEYYCALWYSNRWVFGGGTKLTVL |
| 42. | VH-VL of H2C | artificial | nt | GAGGTGCAGCTGGTCGAGTCTGGAGGAGGATTGGTGCAGCCTGGAGGGTCATTGAAACTCTCATG |
| | | | | TGCAGCCTCTGGATTCACCTTCAATAAGTACGCCATGAACTGGGTCCGCCAGGCTCCAGGAAAGG |
| | | | | GTTTGGAATGGGTTGCTCGCATAAGAAGTAAATATAATAATTATGCAACATATTATGCCGATTCA |
| | | | | GTGAAAGACAGGTTCACCATCTCCAGAGATGATTCAAAAAACACTGCCTATCTACAAATGAACAA |
| | | | | CTTGAAAACTGAGGACACTGCCGTGTACTACTGTGTGAGACATGGGAACTTCGGTAATAGCTACA |
| | | | | TATCCTACTGGGCTTACTGGGGCCAAGGGACTCTGGTCACCGTCTCCTCAGGTGGTGGTGGTTCT |
| | | | | GGCGGCGGCGGCTCCGGTGGTGGTGGTTCTCAGACTGTTGTGACTCAGGAACCTTCACTCACCGT |
| | | | | ATCACCTGGTGGAACAGTCACACTCACTTGTGGCTCCTCGACTGGGGCTGTTACATCTGGCTACT |
| | | | | ACCCAAACTGGGTCCAACAAAAACCAGGTCAGGCACCCCGTGGTCTAATAGGTGGGACTAAGTTC |
| | | | | CTCGCCCCCGGTACTCCTGCCAGATTCTCAGGCTCCCTGCTTGGAGGCAAGGCTGCCCTCACCCT |
| | | | | CTCAGGGGTACAGCCAGAGGATGAGGCAGAATATTACTGTGCTCTATGGTACAGCAACCGCTGGG |
| | | | | TGTTCGGTGGAGGAACCAAACTGACTGTCCTA |
| 43. | VH-VL-P of | artificial | aa | EVQLLESGGGLVQPGGSLKLSCAASGFTFNKYAMNWVRQAPGKGLEWVARIRSKYNNYATYYADS |
| | H2C | | | VKDRFTISRDDSKNTAYLQMNNLKTEDTAVYYCVRHGNFGNSYISYWAYWGQGTLVTVSSGGGGS |
| | | | | GGGGSGGGGSELVVTQEPSLTVSPGGTVTLTCGSSTGAVTSGYYPNWVQQKPGQAPRGLIGGTKF |
| | | | | LAPGTPARFSGSLLGGKAALTLSGVQPEDEAEYYCALWYSNRWVFGGGTKLTVL |
| 44. | VH-VL-P of | artificial | nt | GAGGTGCAGCTGCTCGAGTCTGGAGGAGGATTGGTGCAGCCTGGAGGGTCATTGAAACTCTCATG |
| | H2C | | | TGCAGCCTCTGGATTCACCTTCAATAAGTACGCCATGAACTGGGTCCGCCAGGCTCCAGGAAAGG |
| | | | | GTTTGGAATGGGTTGCTCGCATAAGAAGTAAATATAATAATTATGCAACATATTATGCCGATTCA |
| | | | | GTGAAAGACAGGTTCACCATCTCCAGAGATGATTCAAAAAACACTGCCTATCTACAAATGAACAA |
| | | | | CTTGAAAACTGAGGACACTGCCGTGTACTACTGTGTGAGACATGGGAACTTCGGTAATAGCTACA |
| | | | | TATCCTACTGGGCTTACTGGGGCCAAGGGACTCTGGTCACCGTCTCCTCAGGTGGTGGTGGTTCT |
| | | | | GGCGGCGGCGGCTCCGGTGGTGGTGGTTCTGAGCTCGTTGTGACTCAGGAACCTTCACTCACCGT |
| | | | | ATCACCTGGTGGAACAGTCACACTCACTTGTGGCTCCTCGACTGGGGCTGTTACATCTGGCTACT |
| | | | | ACCCAAACTGGGTCCAACAAAAACCAGGTCAGGCACCCCGTGGTCTAATAGGTGGGACTAAGTTC |
| | | | | CTCGCCCCCGGTACTCCTGCCAGATTCTCAGGCTCCCTGCTTGGAGGCAAGGCTGCCCTCACCCT |
| | | | | CTCAGGGGTACAGCCAGAGGATGAGGCAGAATATTACTGTGCTCTATGGTACAGCAACCGCTGGG |
| | | | | TGTTCGGTGGAGGAACCAAACTGACTGTCCTA |
| 45. | CDR-L1 of H1E | artificial | aa | GSSTGAVTSGYYPN |
| 46. | CDR-L2 of H1E | artificial | aa | GTKFLAP |
| 47. | CDR-L3 of H1E | artificial | aa | ALWYSNRWV |
| 48. | CDR-H1 of H1E | artificial | aa | SYAMN |
| 49. | CDR-H2 of H1E | artificial | aa | RIRSKYNNYATYYADSVKG |
| 50. | CDR-H3 of H1E | artificial | aa | HGNFGNSYLSFWAY |
| 51. | VH of H1E | artificial | aa | EVQLVESGGGLEQPGGSLKLSCAASGFTFNSYAMNWVRQAPGKGLEWVARIRSKYNNYATYYADS |
| | | | | VKGRFTISRDDSKNTAYLQMNNLKTEDTAVYYCVRHGNFGNSYLSFWAYWGQGTLVTVSS |
| 52. | VH of H1E | artificial | nt | GAGGTGCAGCTGGTCGAGTCTGGAGGAGGATTGGAGCAGCCTGGAGGGTCATTGAAACTCTCATG |
| | | | | TGCAGCCTCTGGATTCACCTTCAATTCGTACGCCATGAACTGGGTCCGCCAGGCTCCAGGAAAGG |
| | | | | GTTTGGAATGGGTTGCTCGCATAAGAAGTAAATATAATAATTATGCAACATATTATGCCGATTCA |
| | | | | GTGAAAGGGAGGTTCACCATCTCCAGAGATGATTCAAAAAACACTGCCTATCTACAAATGAACAA |
| | | | | CTTGAAAACTGAGGACACTGCCGTGTACTACTGTGTGAGACATGGGAACTTCGGTAATAGCTACC |
| | | | | TATCCTTCTGGGCTTACTGGGGCCAAGGGACTCTGGTCACCGTCTCCTC |
| 53. | VL of H1E | artificial | aa | QTVVTQEPSLTVSPGGTVTLTCGSSTGAVTSGYYPNWVQQKPGQAPRGLIGGTKFLAPGTPARFS |
| | | | | GSLLGGKAALTLSGVQPEDEAEYYCALWYSNRWVFGGGTKLTVL |
| 54. | VL of H1E | artificial | nt | CAGACTGTTGTGACTCAGGAACCTTCACTCACCGTATCACCTGGTGGAACAGTCACACTCACTTG |
| | | | | TGGCTCCTCGACTGGGGCTGTTACATCTGGCTACTACCCAAACTGGGTCCAACAAAAACCAGGTC |
| | | | | AGGCACCCCGTGGTCTAATAGGTGGGACTAAGTTCCTCGCCCCCGGTACTCCTGCCAGATTCTCA |
| | | | | GGCTCCCTGCTTGGAGGCAAGGCTGCCCTCACCCTCTCAGGGGTACAGCCAGAGGATGAGGCAGA |
| | | | | ATATTACTGTGCTCTATGGTACAGCAACCGCTGGGTGTTCGGTGGAGGAACCAAACTGACTGTCC |
| | | | | TA |
| 55. | VH-P of H1E | artificial | aa | EVQLLESGGGLEQPGGSLKLSCAASGFTFNSYAMNWVRQAPGKGLEWVARIRSKYNNYATYYADS |
| | | | | VKGRFTISRDDSKNTAYLQMNNLKTEDTAVYYCVRHGNFGNSYLSFWAYWGQGTLVTVSS |
| 56. | VH-P of H1E | artificial | nt | GAGGTGCAGCTGCTCGAGTCTGGAGGAGGATTGGAGCAGCCTGGAGGGTCATTGAAACTCTCATG |
| | | | | TGCAGCCTCTGGATTCACCTTCAATTCGTACGCCATGAACTGGGTCCGCCAGGCTCCAGGAAAGG |
| | | | | GTTTGGAATGGGTTGCTCGCATAAGAAGTAAATATAATAATTATGCAACATATTATGCCGATTCA |
| | | | | GTGAAAGGGAGGTTCACCATCTCCAGAGATGATTCAAAAAACACTGCCTATCTACAAATGAACAA |
| | | | | CTTGAAAACTGAGGACACTGCCGTGTACTACTGTGTGAGACATGGGAACTTCGGTAATAGCTACC |
| | | | | TATCCTTCTGGGCTTACTGGGGCCAAGGGACTCTGGTCACCGTCTCCTCA |
| 57. | VL-P of H1E | artificial | aa | ELVVTQEPSLTVSPGGTVTLTCGSSTGAVTSGYYPNWVQQKPGQAPRGLIGGTKFLAPGTPARFS |
| | | | | GSLLGGKAALTLSGVQPEDEAEYYCALWYSNRWVFGGGTKLTVL |
| 58. | VL-P of H1E | artificial | nt | GAGCTCGTTGTGACTCAGGAACCTTCACTCACCGTATCACCTGGTGGAACAGTCACACTCACTTG |
| | | | | TGGCTCCTCGACTGGGGCTGTTACATCTGGCTACTACCCAAACTGGGTCCAACAAAAACCAGGTC |
| | | | | AGGCACCCCGTGGTCTAATAGGTGGGACTAAGTTCCTCGCCCCCGGTACTCCTGCCAGATTCTCA |
| | | | | GGCTCCCTGCTTGGAGGCAAGGCTGCCCTCACCCTCTCAGGGGTACAGCCAGAGGATGAGGCAGA |
| | | | | ATATTACTGTGCTCTATGGTACAGCAACCGCTGGGTGTTCGGTGGAGGAACCAAACTGACTGTCC |
| | | | | TA |
| 59. | VH-VL of H1E | artificial | aa | EVQLVESGGGLEQPGGSLKLSCAASGFTFNSYAMNWVRQAPGKGLEWVARIRSKYNNYATYYADS |
| | | | | VKGRFTISRDDSKNTAYLQMNNLKTEDTAVYYCVRHGNFGNSYLSFWAYWGQGTLVTVSSGGGGS |
| | | | | GGGGSGGGGSQTVVTQEPSLTVSPGGTVTLTCGSSTGAVTSGYYPNWVQQKPGQAPRGLIGGTKF |
| | | | | LAPGTPARFSGSLLGGKAALTLSGVQPEDEAEYYCALWYSNRWVFGGGTKLTVL |
| 60. | VH-VL of H1E | artificial | nt | GAGGTGCAGCTGGTCGAGTCTGGAGGAGGATTGGAGCAGCCTGGAGGGTCATTGAAACTCTCATG |
| | | | | TGCAGCCTCTGGATTCACCTTCAATTCGTACGCCATGAACTGGGTCCGCCAGGCTCCAGGAAAGG |
| | | | | GTTTGGAATGGGTTGCTCGCATAAGAAGTAAATATAATAATTATGCAACATATTATGCCGATTCA |
| | | | | GTGAAAGGGAGGTTCACCATCTCCAGAGATGATTCAAAAAACACTGCCTATCTACAAATGAACAA |
| | | | | CTTGAAAACTGAGGACACTGCCGTGTACTACTGTGTGAGACATGGGAACTTCGGTAATAGCTACC |
| | | | | TATCCTTCTGGGCTTACTGGGGCCAAGGGACTCTGGTCACCGTCTCCTCAGGTGGTGGTGGTTCT |
| | | | | GGCGGCGGCGGCTCCGGTGGTGGTGGTTCTCAGACTGTTGTGACTCAGGAACCTTCACTCACCGT |
| | | | | ATCACCTGGTGGAACAGTCACACTCACTTGTGGCTCCTCGACTGGGGCTGTTACATCTGGCTACT |
| | | | | ACCCAAACTGGGTCCAACAAAAACCAGGTCAGGCACCCCGTGGTCTAATAGGTGGGACTAAGTTC |
| | | | | CTCGCCCCCGGTACTCCTGCCAGATTCTCAGGCTCCCTGCTTGGAGGCAAGGCTGCCCTCACCCT |
| | | | | CTCAGGGGTACAGCCAGAGGATGAGGCAGAATATTACTGTGCTCTATGGTACAGCAACCGCTGGG |
| | | | | TGTTCGGTGGAGGAACCAAACTGACTGTCCTA |
| 61. | VH-VL-P of | artificial | aa | EVQLLESGGGLEQPGGSLKLSCAASGFTFNSYAMNWVRQAPGKGLEWVARIRSKYNNYATYYADS |
| | H1E | | | VKGRFTISRDDSKNTAYLQMNNLKTEDTAVYYCVRHGNFGNSYLSFWAYWGQGTLVTVSSGGGGS |
| | | | | GGGGSGGGGSELVVTQEPSLTVSPGGTVTLTCGSSTGAVTSGYYPNWVQQKPGQAPRGLIGGTKF |
| | | | | LAPGTPARFSGSLLGGKAALTLSGVQPEDEAEYYCALWYSNRWVFGGGTKLTVL |
| 62. | VH-VL-P of | artificial | nt | GAGGTGCAGCTGCTCGAGTCTGGAGGAGGATTGGAGCAGCCTGGAGGGTCATTGAAACTCTCATG |
| | H1E | | | TGCAGCCTCTGGATTCACCTTCAATTCGTACGCCATGAACTGGGTCCGCCAGGCTCCAGGAAAGG |
| | | | | GTTTGGAATGGGTTGCTCGCATAAGAAGTAAATATAATAATTATGCAACATATTATGCCGATTCA |
| | | | | GTGAAAGGGAGGTTCACCATCTCCAGAGATGATTCAAAAAACACTGCCTATCTACAAATGAACAA |
| | | | | CTTGAAAACTGAGGACACTGCCGTGTACTACTGTGTGAGACATGGGAACTTCGGTAATAGCTACC |
| | | | | TATCCTTCTGGGCTTACTGGGGCCAAGGGACTCTGGTCACCGTCTCCTCAGGTGGTGGTGGTTCT |
| | | | | GGCGGCGGCGGCTCCGGTGGTGGTGGTTCTGAGCTCGTTGTGACTCAGGAACCTTCACTCACCGT |
| | | | | ATCACCTGGTGGAACAGTCACACTCACTTGTGGCTCCTCGACTGGGGCTGTTACATCTGGCTACT |
| | | | | ACCCAAACTGGGTCCAACAAAAACCAGGTCAGGCACCCCGTGGTCTAATAGGTGGGACTAAGTTC |
| | | | | CTCGCCCCCGGTACTCCTGCCAGATTCTCAGGCTCCCTGCTTGGAGGCAAGGCTGCCCTCACCCT |
| | | | | CTCAGGGGTACAGCCAGAGGATGAGGCAGAATATTACTGTGCTCTATGGTACAGCAACCGCTGGG |
| | | | | TGTTCGGTGGAGGAACCAAACTGACTGTCCTA |
| 63. | CDR-L1 of G4H | artificial | aa | GSSTGAVTSGYYPN |
| 64. | CDR-L2 of G4H | artificial | aa | GTKFLAP |
| 65. | CDR-L3 of G4H | artificial | aa | ALWYSNRWV |
| 66. | CDR-H1 of G4H | artificial | aa | RYAMN |
| 67. | CDR-H2 of G4H | artificial | aa | RIRSKYNNYATYYADSVKG |
| 68. | CDR-H3 of G4H | artificial | aa | HGNFGNSYLSYFAY |
| 69. | VH of G4H | artificial | aa | EVQLVESGGGLVQPGGSLKLSCAASGFTFNRYAMNWVRQAPGKGLEWVARIRSKYNNYATYYADS |
| | | | | VKGRFTISRDDSKNTAYLQMNNLKTEDTAVYYCVRHGNFGNSYLSYFAYWGQGTLVTVSS |
| 70. | VH of G4H | artificial | nt | GAGGTGCAGCTGGTCGAGTCTGGAGGAGGATTGGTGCAGCCTGGAGGGTCATTGAAACTCTCATG |
| | | | | TGCAGCCTCTGGATTCACCTTCAATCGCTACGCCATGAACTGGGTCCGCCAGGCTCCAGGAAAGG |
| | | | | GTTTGGAATGGGTTGCTCGCATAAGAAGTAAATATAATAATTATGCAACATATTATGCCGATTCA |
| | | | | GTGAAAGGGAGGTTCACCATCTCCAGAGATGATTCAAAAAACACTGCCTATCTACAAATGAACAA |
| | | | | CTTGAAAACTGAGGACACTGCCGTGTACTACTGTGTGAGACATGGGAACTTCGGTAATAGCTACT |
| | | | | TATCCTACTTCGCTTACTGGGGCCAAGGGACTCTGGTCACCGTCTCCTCA |
| 71. | VL of G4H | artificial | aa | QTVVTQEPSLTVSPGGTVTLTCGSSTGAVTSGYYPNWVQQKPGQAPRGLIGGTKFLAPGTPARFS |
| | | | | GSLLGGKAALTLSGVQPEDEAEYYCALWYSNRWVFGGGTKLTVL |
| 72. | VL of G4H | artificial | nt | CAGACTGTTGTGACTCAGGAACCTTCACTCACCGTATCACCTGGTGGAACAGTCACACTCACTTG |
| | | | | TGGCTCCTCGACTGGGGCTGTTACATCTGGCTACTACCCAAACTGGGTCCAACAAAAACCAGGTC |
| | | | | AGGCACCCCGTGGTCTAATAGGTGGGACTAAGTTCCTCGCCCCCGGTACTCCTGCCAGATTCTCA |
| | | | | GGCTCCCTGCTTGGAGGCAAGGCTGCCCTCACCCTCTCAGGGGTACAGCCAGAGGATGAGGCAGA |
| | | | | ATATTACTGTGCTCTATGGTACAGCAACCGCTGGGTGTTCGGTGGAGGAACCAAACTGACTGTCC |
| | | | | TA |
| 73. | VH-P of G4H | artificial | aa | EVQLLESGGGLVQPGGSLKLSCAASGFTFNRYAMNWVRQAPGKGLEWVARIRSKYNNYATYYADS |
| | | | | VKGRFTISRDDSKNTAYLQMNNLKTEDTAVYYCVRHGNFGNSYLSYFAYWGQGTLVTVSS |
| 74. | VH-P of G4H | artificial | nt | GAGGTGCAGCTGCTCGAGTCTGGAGGAGGATTGGTGCAGCCTGGAGGGTCATTGAAACTCTCATG |
| | | | | TGCAGCCTCTGGATTCACCTTCAATCGCTACGCCATGAACTGGGTCCGCCAGGCTCCAGGAAAGG |
| | | | | GTTTGGAATGGGTTGCTCGCATAAGAAGTAAATATAATAATTATGCAACATATTATGCCGATTCA |
| | | | | GTGAAAGGGAGGTTCACCATCTCCAGAGATGATTCAAAAAACACTGCCTATCTACAAATGAACAA |
| | | | | CTTGAAAACTGAGGACACTGCCGTGTACTACTGTGTGAGACATGGGAACTTCGGTAATAGCTACT |
| | | | | TATCCTACTTCGCTTACTGGGGCCAAGGGACTCTGGTCACCGTCTCCTCA |
| 75. | VL-P of G4H | artificial | aa | ELVVTQEPSLTVSPGGTVTLTCGSSTGAVTSGYYPNWVQQKPGQAPRGLIGGTKFLAPGTPARFS |
| | | | | GSLLGGKAALTLSGVQPEDEAEYYCALWYSNRWVFGGGTKLTVL |
| 76. | VL-P of G4H | artificial | nt | GAGCTCGTTGTGACTCAGGAACCTTCACTCACCGTATCACCTGGTGGAACAGTCACACTCACTTG |
| | | | | TGGCTCCTCGACTGGGGCTGTTACATCTGGCTACTACCCAAACTGGGTCCAACAAAAACCAGGTC |
| | | | | AGGCACCCCGTGGTCTAATAGGTGGGACTAAGTTCCTCGCCCCCGGTACTCCTGCCAGATTCTCA |
| | | | | GGCTCCCTGCTTGGAGGCAAGGCTGCCCTCACCCTCTCAGGGGTACAGCCAGAGGATGAGGCAGA |
| | | | | ATATTACTGTGCTCTATGGTACAGCAACCGCTGGGTGTTCGGTGGAGGAACCAAACTGACTGTCC |
| | | | | TA |
| 77. | VH-VL of G4H | artificial | aa | EVQLVESGGGLVQPGGSLKLSCAASGFTFNRYAMNWVRQAPGKGLEWVARIRSKYNNYATYYADS |
| | | | | VKGRFTISRDDSKNTAYLQMNNLKTEDTAVYYCVRHGNFGNSYLSYFAYWGQGTLVTVSSGGGGS |
| | | | | GGGGSGGGGSQTVVTQEPSLTVSPGGTVTLTCGSSTGAVTSGYYPNWVQQKPGQAPRGLIGGTKF |
| | | | | LAPGTPARFSGSLLGGKAALTLSGVQPEDEAEYYCALWYSNRWVFGGGTKLTVL |
| 78. | VH-VL of G4H | artificial | nt | GAGGTGCAGCTGGTCGAGTCTGGAGGAGGATTGGTGCAGCCTGGAGGGTCATTGAAACTCTCATG |
| | | | | TGCAGCCTCTGGATTCACCTTCAATCGCTACGCCATGAACTGGGTCCGCCAGGCTCCAGGAAAGG |
| | | | | GTTTGGAATGGGTTGCTCGCATAAGAAGTAAATATAATAATTATGCAACATATTATGCCGATTCA |
| | | | | GTGAAAGGGAGGTTCACCATCTCCAGAGATGATTCAAAAAACACTGCCTATCTACAAATGAACAA |
| | | | | CTTGAAAACTGAGGACACTGCCGTGTACTACTGTGTGAGACATGGGAACTTCGGTAATAGCTACT |
| | | | | TATCCTACTTCGCTTACTGGGGCCAAGGGACTCTGGTCACCGTCTCCTCAGGTGGTGGTGGTTCT |
| | | | | GGCGGCGGCGGCTCCGGTGGTGGTGGTTCTCAGACTGTTGTGACTCAGGAACCTTCACTCACCGT |
| | | | | ATCACCTGGTGGAACAGTCACACTCACTTGTGGCTCCTCGACTGGGGCTGTTACATCTGGCTACT |
| | | | | ACCCAAACTGGGTCCAACAAAAACCAGGTCAGGCACCCCGTGGTCTAATAGGTGGGACTAAGTTC |
| | | | | CTCGCCCCCGGTACTCCTGCCAGATTCTCAGGCTCCCTGCTTGGAGGCAAGGCTGCCCTCACCCT |
| | | | | CTCAGGGGTACAGCCAGAGGATGAGGCAGAATATTACTGTGCTCTATGGTACAGCAACCGCTGGG |
| | | | | TGTTCGGTGGAGGAACCAAACTGACTGTCCTA |
| 79. | VH-VL-P of | artificial | aa | EVQLLESGGGLVQPGGSLKLSCAASGFTFNRYAMNWVRQAPGKGLEWVARIRSKYNNYATYYADS |
| | G4H | | | VKGRFTISRDDSKNTAYLQMNNLKTEDTAVYYCVRHGNFGNSYLSYFAYWGQGTLVTVSSGGGGS |
| | | | | GGGGSGGGGSELVVTQEPSLTVSPGGTVTLTCGSSTGAVTSGYYPNWVQQKPGQAPRGLIGGTKF |
| | | | | LAPGTPARFSGSLLGGKAALTLSGVQPEDEAEYYCALWYSNRWVFGGGTKLTVL |
| 80. | VH-VL-P of | artificial | nt | GAGGTGCAGCTGCTCGAGTCTGGAGGAGGATTGGTGCAGCCTGGAGGGTCATTGAAACTCTCATG |
| | G4H | | | TGCAGCCTCTGGATTCACCTTCAATCGCTACGCCATGAACTGGGTCCGCCAGGCTCCAGGAAAGG |
| | | | | GTTTGGAATGGGTTGCTCGCATAAGAAGTAAATATAATAATTATGCAACATATTATGCCGATTCA |
| | | | | GTGAAAGGGAGGTTCACCATCTCCAGAGATGATTCAAAAAACACTGCCTATCTACAAATGAACAA |
| | | | | CTTGAAAACTGAGGACACTGCCGTGTACTACTGTGTGAGACATGGGAACTTCGGTAATAGCTACT |
| | | | | TATCCTACTTCGCTTACTGGGGCCAAGGGACTCTGGTCACCGTCTCCTCAGGTGGTGGTGGTTCT |
| | | | | GGCGGCGGCGGCTCCGGTGGTGGTGGTTCTGAGCTCGTTGTGACTCAGGAACCTTCACTCACCGT |
| | | | | ATCACCTGGTGGAACAGTCACACTCACTTGTGGCTCCTCGACTGGGGCTGTTACATCTGGCTACT |
| | | | | ACCCAAACTGGGTCCAACAAAAACCAGGTCAGGCACCCCGTGGTCTAATAGGTGGGACTAAGTTC |
| | | | | CTCGCCCCCGGTACTCCTGCCAGATTCTCAGGCTCCCTGCTTGGAGGCAAGGCTGCCCTCACCCT |
| | | | | CTCAGGGGTACAGCCAGAGGATGAGGCAGAATATTACTGTGCTCTATGGTACAGCAACCGCTGGG |
| | | | | TGTTCGGTGGAGGAACCAAACTGACTGTCCTA |
| 81. | CDR-L1 of A2J | artificial | aa | RSSTGAVTSGYYPN |
| 82. | CDR-L2 of A2J | artificial | aa | ATDMRPS |
| 83. | CDR-L3 of A2J | artificial | aa | ALWYSNRWV |
| 84. | CDR-H1 of A2J | artificial | aa | VYAMN |
| 85. | CDR-H2 of A2J | artificial | aa | RIRSKYNNYATYYADSVKK |
| 86. | CDR-H3 of A2J | artificial | aa | HGNFGNSYLSWWAY |
| 87. | VH of A2J | artificial | aa | EVQLVESGGGLVQPGGSLKLSCAASGFTFNVYAMNWVRQAPGKGLEWVARIRSKYNNYATYYADS |
| | | | | VKKRFTISRDDSKNTAYLQMNNLKTEDTAVYYCVRHGNFGNSYLSWWAYWGQGTLVTVSS |
| 88. | VH of A2J | artificial | nt | GAGGTGCAGCTGGTCGAGTCTGGAGGAGGATTGGTGCAGCCTGGAGGGTCATTGAAACTCTCATG |
| | | | | TGCAGCCTCTGGATTCACCTTCAATGTCTACGCCATGAACTGGGTCCGCCAGGCTCCAGGAAAGG |
| | | | | GTTTGGAATGGGTTGCTCGCATAAGAAGTAAATATAATAATTATGCAACATATTATGCCGATTCA |
| | | | | GTGAAAAAGAGGTTCACCATCTCCAGAGATGATTCAAAAAACACTGCCTATCTACAAATGAACAA |
| | | | | CTTGAAAACTGAGGACACTGCCGTGTACTACTGTGTGAGACATGGGAACTTCGGTAATAGCTACT |
| | | | | TATCCTGGTGGGCTTACTGGGGCCAAGGGACTCTGGTCACCGTCTCCTCA |
| 89. | VL of A2J | artificial | aa | QTVVTQEPSLTVSPGGTVTLTCRSSTGAVTSGYYPNWVQQKPGQAPRGLIGATDMRPSGTPARFS |
| | | | | GSLLGGKAALTLSGVQPEDEAEYYCALWYSNRWVFGGGTKLTVL |
| 90. | VL of A2J | artificial | nt | CAGACTGTTGTGACTCAGGAACCTTCACTCACCGTATCACCTGGTGGAACAGTCACACTCACTTG |
| | | | | TCGCTCCTCGACTGGGGCTGTTACATCTGGCTACTACCCAAACTGGGTCCAACAAAAACCAGGTC |
| | | | | AGGCACCCCGTGGTCTAATAGGTGCCACTGACATGAGGCCCTCTGGTACTCCTGCCAGATTCTCA |
| | | | | GGCTCCCTGCTTGGAGGCAAGGCTGCCCTCACCCTCTCAGGGGTACAGCCAGAGGATGAGGCAGA |
| | | | | ATATTACTGTGCTCTATGGTACAGCAACCGCTGGGTGTTCGGTGGAGGAACCAAACTGACTGTCC |
| | | | | TA |
| 91. | VH-P of A2J | artificial | aa | EVQLLESGGGLVQPGGSLKLSCAASGFTFNVYAMNWVRQAPGKGLEWVARIRSKYNNYATYYADS |
| | | | | VKKRFTISRDDSKNTAYLQMNNLKTEDTAVYYCVRHGNFGNSYLSWWAYWGQGTLVTVSS |
| 92. | VH-P of A2J | artificial | nt | GAGGTGCAGCTGCTCGAGTCTGGAGGAGGATTGGTGCAGCCTGGAGGGTCATTGAAACTCTCATG |
| | | | | TGCAGCCTCTGGATTCACCTTCAATGTCTACGCCATGAACTGGGTCCGCCAGGCTCCAGGAAAGG |
| | | | | GTTTGGAATGGGTTGCTCGCATAAGAAGTAAATATAATAATTATGCAACATATTATGCCGATTCA |
| | | | | GTGAAAAAGAGGTTCACCATCTCCAGAGATGATTCAAAAAACACTGCCTATCTACAAATGAACAA |
| | | | | CTTGAAAACTGAGGACACTGCCGTGTACTACTGTGTGAGACATGGGAACTTCGGTAATAGCTACT |
| | | | | TATCCTGGTGGGCTTACTGGGGCCAAGGGACTCTGGTCACCGTCTCCTCA |
| 93. | VL-P of A2J | artificial | aa | ELVVTQEPSLTVSPGGTVTLTCRSSTGAVTSGYYPNWVQQKPGQAPRGLIGATDMRPSGTPARFS |
| | | | | GSLLGGKAALTLSGVQPEDEAEYYCALWYSNRWVFGGGTKLTVL |
| 94. | VL-P of A2J | artificial | nt | GAGCTCGTTGTGACTCAGGAACCTTCACTCACCGTATCACCTGGTGGAACAGTCACACTCACTTG |
| | | | | TCGCTCCTCGACTGGGGCTGTTACATCTGGCTACTACCCAAACTGGGTCCAACAAAAACCAGGTC |
| | | | | AGGCACCCCGTGGTCTAATAGGTGCCACTGACATGAGGCCCTCTGGTACTCCTGCCAGATTCTCA |
| | | | | GGCTCCCTGCTTGGAGGCAAGGCTGCCCTCACCCTCTCAGGGGTACAGCCAGAGGATGAGGCAGA |
| | | | | ATATTACTGTGCTCTATGGTACAGCAACCGCTGGGTGTTCGGTGGAGGAACCAAACTGACTGTCC |
| | | | | TA |
| 95. | VH-VL of A2J | artificial | aa | EVQLVESGGGLVQPGGSLKLSCAASGFTFNVYAMNWVRQAPGKGLEWVARIRSKYNNYATYYADS |
| | | | | VKKRFTISRDDSKNTAYLQMNNLKTEDTAVYYCVRHGNFGNSYLSWWAYWGQGTLVTVSSGGGGS |
| | | | | GGGGSGGGGSQTVVTQEPSLTVSPGGTVTLTCRSSTGAVTSGYYPNWVQQKPGQAPRGLIGATDM |
| | | | | RPSGTPARFSGSLLGGKAALTLSGVQPEDEAEYYCALWYSNRWVFGGGTKLTVL |
| 96. | VH-VL of A2J | artificial | nt | GAGGTGCAGCTGGTCGAGTCTGGAGGAGGATTGGTGCAGCCTGGAGGGTCATTGAAACTCTCATG |
| | | | | TGCAGCCTCTGGATTCACCTTCAATGTCTACGCCATGAACTGGGTCCGCCAGGCTCCAGGAAAGG |
| | | | | GTTTGGAATGGGTTGCTCGCATAAGAAGTAAATATAATAATTATGCAACATATTATGCCGATTCA |
| | | | | GTGAAAAAGAGGTTCACCATCTCCAGAGATGATTCAAAAAACACTGCCTATCTACAAATGAACAA |
| | | | | CTTGAAAACTGAGGACACTGCCGTGTACTACTGTGTGAGACATGGGAACTTCGGTAATAGCTACT |
| | | | | TATCCTGGTGGGCTTACTGGGGCCAAGGGACTCTGGTCACCGTCTCCTCAGGTGGTGGTGGTTCT |
| | | | | GGCGGCGGCGGCTCCGGTGGTGGTGGTTCTCAGACTGTTGTGACTCAGGAACCTTCACTCACCGT |
| | | | | ATCACCTGGTGGAACAGTCACACTCACTTGTCGCTCCTCGACTGGGGCTGTTACATCTGGCTACT |
| | | | | ACCCAAACTGGGTCCAACAAAAACCAGGTCAGGCACCCCGTGGTCTAATAGGTGCCACTGACATG |
| | | | | AGGCCCTCTGGTACTCCTGCCAGATTCTCAGGCTCCCTGCTTGGAGGCAAGGCTGCCCTCACCCT |
| | | | | CTCAGGGGTACAGCCAGAGGATGAGGCAGAATATTACTGTGCTCTATGGTACAGCAACCGCTGGG |
| | | | | TGTTCGGTGGAGGAACCAAACTGACTGTCCTA |
| 97. | VH-VL-P of | artificial | aa | EVQLLESGGGLVQPGGSLKLSCAASGFTFNVYAMNWVRQAPGKGLEWVARIRSKYNNYATYYADS |
| | A2J | | | VKKRFTISRDDSKNTAYLQMNNLKTEDTAVYYCVRHGNFGNSYLSWWAYWGQGTLVTVSSGGGGS |
| | | | | GGGGSGGGGSELVVTQEPSLTVSPGGTVTLTCRSSTGAVTSGYYPNWVQQKPGQAPRGLIGATDM |
| | | | | RPSGTPARFSGSLLGGKAALTLSGVQPEDEAEYYCALWYSNRWVFGGGTKLTVL |
| 98. | VH-VL-P of | artificial | nt | GAGGTGCAGCTGCTCGAGTCTGGAGGAGGATTGGTGCAGCCTGGAGGGTCATTGAAACTCTCATG |
| | A2J | | | TGCAGCCTCTGGATTCACCTTCAATGTCTACGCCATGAACTGGGTCCGCCAGGCTCCAGGAAAGG |
| | | | | GTTTGGAATGGGTTGCTCGCATAAGAAGTAAATATAATAATTATGCAACATATTATGCCGATTCA |
| | | | | GTGAAAAAGAGGTTCACCATCTCCAGAGATGATTCAAAAAACACTGCCTATCTACAAATGAACAA |
| | | | | CTTGAAAACTGAGGACACTGCCGTGTACTACTGTGTGAGACATGGGAACTTCGGTAATAGCTACT |
| | | | | TATCCTGGTGGGCTTACTGGGGCCAAGGGACTCTGGTCACCGTCTCCTCAGGTGGTGGTGGTTCT |
| | | | | GGCGGCGGCGGCTCCGGTGGTGGTGGTTCTGAGCTCGTTGTGACTCAGGAACCTTCACTCACCGT |
| | | | | ATCACCTGGTGGAACAGTCACACTCACTTGTCGCTCCTCGACTGGGGCTGTTACATCTGGCTACT |
| | | | | ACCCAAACTGGGTCCAACAAAAACCAGGTCAGGCACCCCGTGGTCTAATAGGTGCCACTGACATG |
| | | | | AGGCCCTCTGGTACTCCTGCCAGATTCTCAGGCTCCCTGCTTGGAGGCAAGGCTGCCCTCACCCT |
| | | | | CTCAGGGGTACAGCCAGAGGATGAGGCAGAATATTACTGTGCTCTATGGTACAGCAACCGCTGGG |
| | | | | TGTTCGGTGGAGGAACCAAACTGACTGTCCTA |
| 99. | CDR-L1 of E1L | artificial | aa | GSSTGAVTSGYYPN |
| 100. | CDR-L2 of E1L | artificial | aa | GTKFLAP |
| 101. | CDR-L3 of E1L | artificial | aa | ALWYSNRWV |
| 102. | CDR-H1 of E1L | artificial | aa | KYAMN |
| 103. | CDR-H2 of E1L | artificial | aa | RIRSKYNNYATYYADSVKS |
| 104. | CDR-H3 of E1L | artificial | aa | HGNFGNSYTSYYAY |
| 105. | VH of E1L | artificial | aa | EVQLVESGGGLVQPGGSLKLSCAASGFTFNKYAMNWVRQAPGKGLEWVARIRSKYNNYATYYADS |
| | | | | VKSRFTISRDDSKNTAYLQMNNLKTEDTAVYYCVRHGNFGNSYTSYYAYWGQGTLVTVSS |
| 106. | VH of E1L | artificial | nt | GAGGTGCAGCTGGTCGAGTCTGGAGGAGGATTGGTGCAGCCTGGAGGGTCATTGAAACTCTCATG |
| | | | | TGCAGCCTCTGGATTCACCTTCAATAAGTACGCCATGAACTGGGTCCGCCAGGCTCCAGGAAAGG |
| | | | | GTTTGGAATGGGTTGCTCGCATAAGAAGTAAATATAATAATTATGCAACATATTATGCCGATTCA |
| | | | | GTGAAATCGAGGTTCACCATCTCCAGAGATGATTCAAAAAACACTGCCTATCTACAAATGAACAA |
| | | | | CTTGAAAACTGAGGACACTGCCGTGTACTACTGTGTGAGACATGGGAACTTCGGTAATAGCTACA |
| | | | | CATCCTACTACGCTTACTGGGGCCAAGGGACTCTGGTCACCGTCTCCTCA |
| 107. | VL of E1L | artificial | aa | QTVVTQEPSLTVSPGGTVTLTCGSSTGAVTSGYYPNWVQQKPGQAPRGLIGGTKFLAPGTPARFS |
| | | | | GSLLGGKAALTLSGVQPEDEAEYYCALWYSNRWVFGGGTKLTVL |
| 108. | VL of E1L | artificial | nt | CAGACTGTTGTGACTCAGGAACCTTCACTCACCGTATCACCTGGTGGAACAGTCACACTCACTTG |
| | | | | TGGCTCCTCGACTGGGGCTGTTACATCTGGCTACTACCCAAACTGGGTCCAACAAAAACCAGGTC |
| | | | | AGGCACCCCGTGGTCTAATAGGTGGGACTAAGTTCCTCGCCCCCGGTACTCCTGCCAGATTCTCA |
| | | | | GGCTCCCTGCTTGGAGGCAAGGCTGCCCTCACCCTCTCAGGGGTACAGCCAGAGGATGAGGCAGA |
| | | | | ATATTACTGTGCTCTATGGTACAGCAACCGCTGGGTGTTCGGTGGAGGAACCAAACTGACTGTCC |
| | | | | TA |
| 109. | VH-P of E1L | artificial | aa | EVQLLESGGGLVQPGGSLKLSCAASGFTFNKYAMNWVRQAPGKGLEWVARIRSKYNNYATYYADS |
| | | | | VKSRFTISRDDSKNTAYLQMNNLKTEDTAVYYCVRHGNFGNSYTSYYAYWGQGTLVTVSS |
| 110. | VH-P of E1L | artificial | nt | GAGGTGCAGCTGCTCGAGTCTGGAGGAGGATTGGTGCAGCCTGGAGGGTCATTGAAACTCTCATG |
| | | | | TGCAGCCTCTGGATTCACCTTCAATAAGTACGCCATGAACTGGGTCCGCCAGGCTCCAGGAAAGG |
| | | | | GTTTGGAATGGGTTGCTCGCATAAGAAGTAAATATAATAATTATGCAACATATTATGCCGATTCA |
| | | | | GTGAAATCGAGGTTCACCATCTCCAGAGATGATTCAAAAAACACTGCCTATCTACAAATGAACAA |
| | | | | CTTGAAAACTGAGGACACTGCCGTGTACTACTGTGTGAGACATGGGAACTTCGGTAATAGCTACA |
| | | | | CATCCTACTACGCTTACTGGGGCCAAGGGACTCTGGTCACCGTCTCCTCA |
| 111. | VL-P of E1L | artificial | aa | ELVVTQEPSLTVSPGGTVTLTCGSSTGAVTSGYYPNWVQQKPGQAPRGLIGGTKFLAPGTPARFS |
| | | | | GSLLGGKAALTLSGVQPEDEAEYYCALWYSNRWVFGGGTKLTVL |
| 112. | VL-P of E1L | artificial | nt | GAGCTCGTTGTGACTCAGGAACCTTCACTCACCGTATCACCTGGTGGAACAGTCACACTCACTTG |
| | | | | TGGCTCCTCGACTGGGGCTGTTACATCTGGCTACTACCCAAACTGGGTCCAACAAAAACCAGGTC |
| | | | | AGGCACCCCGTGGTCTAATAGGTGGGACTAAGTTCCTCGCCCCCGGTACTCCTGCCAGATTCTCA |
| | | | | GGCTCCCTGCTTGGAGGCAAGGCTGCCCTCACCCTCTCAGGGGTACAGCCAGAGGATGAGGCAGA |
| | | | | ATATTACTGTGCTCTATGGTACAGCAACCGCTGGGTGTTCGGTGGAGGAACCAAACTGACTGTCC |
| | | | | TA |
| 113. | VH-VL of E1L | artificial | aa | EVQLVESGGGLVQPGGSLKLSCAASGFTFNKYAMNWVRQAPGKGLEWVARIRSKYNNYATYYADS |
| | | | | VKSRFTISRDDSKNTAYLQMNNLKTEDTAVYYCVRHGNFGNSYTSYYAYWGQGTLVTVSSGGGGS |
| | | | | GGGGSGGGGSQTVVTQEPSLTVSPGGTVTLTCGSSTGAVTSGYYPNWVQQKPGQAPRGLIGGTKF |
| | | | | LAPGTPARFSGSLLGGKAALTLSGVQPEDEAEYYCALWYSNRWVFGGGTKLTVL |
| 114. | VH-VL of E1L | artificial | nt | GAGGTGCAGCTGGTCGAGTCTGGAGGAGGATTGGTGCAGCCTGGAGGGTCATTGAAACTCTCATG |
| | | | | TGCAGCCTCTGGATTCACCTTCAATAAGTACGCCATGAACTGGGTCCGCCAGGCTCCAGGAAAGG |
| | | | | GTTTGGAATGGGTTGCTCGCATAAGAAGTAAATATAATAATTATGCAACATATTATGCCGATTCA |
| | | | | GTGAAATCGAGGTTCACCATCTCCAGAGATGATTCAAAAAACACTGCCTATCTACAAATGAACAA |
| | | | | CTTGAAAACTGAGGACACTGCCGTGTACTACTGTGTGAGACATGGGAACTTCGGTAATAGCTACA |
| | | | | CATCCTACTACGCTTACTGGGGCCAAGGGACTCTGGTCACCGTCTCCTCAGGTGGTGGTGGTTCT |
| | | | | GGCGGCGGCGGCTCCGGTGGTGGTGGTTCTCAGACTGTTGTGACTCAGGAACCTTCACTCACCGT |
| | | | | ATCACCTGGTGGAACAGTCACACTCACTTGTGGCTCCTCGACTGGGGCTGTTACATCTGGCTACT |
| | | | | ACCCAAACTGGGTCCAACAAAAACCAGGTCAGGCACCCCGTGGTCTAATAGGTGGGACTAAGTTC |
| | | | | CTCGCCCCCGGTACTCCTGCCAGATTCTCAGGCTCCCTGCTTGGAGGCAAGGCTGCCCTCACCCT |
| | | | | CTCAGGGGTACAGCCAGAGGATGAGGCAGAATATTACTGTGCTCTATGGTACAGCAACCGCTGGG |
| | | | | TGTTCGGTGGAGGAACCAAACTGACTGTCCTA |
| 115. | VH-VL-P of | artificial | aa | EVQLLESGGGLVQPGGSLKLSCAASGFTFNKYAMNWVRQAPGKGLEWVARIRSKYNNYATYYADS |
| | E1L | | | VKSRFTISRDDSKNTAYLQMNNLKTEDTAVYYCVRHGNFGNSYTSYYAYWGQGTLVTVSSGGGGS |
| | | | | GGGGSGGGGSELVVTQEPSLTVSPGGTVTLTCGSSTGAVTSGYYPNWVQQKPGQAPRGLIGGTKF |
| | | | | LAPGTPARFSGSLLGGKAALTLSGVQPEDEAEYYCALWYSNRWVFGGGTKLTVL |
| 116. | VH-VL-P of | artificial | nt | GAGGTGCAGCTGCTCGAGTCTGGAGGAGGATTGGTGCAGCCTGGAGGGTCATTGAAACTCTCATG |
| | E1L | | | TGCAGCCTCTGGATTCACCTTCAATAAGTACGCCATGAACTGGGTCCGCCAGGCTCCAGGAAAGG |
| | | | | GTTTGGAATGGGTTGCTCGCATAAGAAGTAAATATAATAATTATGCAACATATTATGCCGATTCA |
| | | | | GTGAAATCGAGGTTCACCATCTCCAGAGATGATTCAAAAAACACTGCCTATCTACAAATGAACAA |
| | | | | CTTGAAAACTGAGGACACTGCCGTGTACTACTGTGTGAGACATGGGAACTTCGGTAATAGCTACA |
| | | | | CATCCTACTACGCTTACTGGGGCCAAGGGACTCTGGTCACCGTCTCCTCAGGTGGTGGTGGTTCT |
| | | | | GGCGGCGGCGGCTCCGGTGGTGGTGGTTCTGAGCTCGTTGTGACTCAGGAACCTTCACTCACCGT |
| | | | | ATCACCTGGTGGAACAGTCACACTCACTTGTGGCTCCTCGACTGGGGCTGTTACATCTGGCTACT |
| | | | | ACCCAAACTGGGTCCAACAAAAACCAGGTCAGGCACCCCGTGGTCTAATAGGTGGGACTAAGTTC |
| | | | | CTCGCCCCCGGTACTCCTGCCAGATTCTCAGGCTCCCTGCTTGGAGGCAAGGCTGCCCTCACCCT |
| | | | | CTCAGGGGTACAGCCAGAGGATGAGGCAGAATATTACTGTGCTCTATGGTACAGCAACCGCTGGG |
| | | | | TGTTCGGTGGAGGAACCAAACTGACTGTCCTA |
| 117. | CDR-L1 of E2M | artificial | aa | RSSTGAVTSGYYPN |
| 118. | CDR-L2 of E2M | artificial | aa | ATDMRPS |
| 119. | CDR-L3 of E2M | artificial | aa | ALWYSNRWV |
| 120. | CDR-H1 of E2M | artificial | aa | GYAMN |
| 121. | CDR-H2 of E2M | artificial | aa | RIRSKYNNYATYYADSVKE |
| 122. | CDR-H3 of E2M | artificial | aa | HRNFGNSYLSWFAY |
| 123. | VH of E2M | artificial | aa | EVQLVESGGGLVQPGGSLKLSCAASGFTFNGYAMNWVRQAPGKGLEWVARIRSKYNNYATYYADS |
| | | | | VKERFTISRDDSKNTAYLQMNNLKTEDTAVYYCVRHRNFGNSYLSWFAYWGQGTLVTVSS |
| 124. | VH of E2M | artificial | nt | GAGGTGCAGCTGGTCGAGTCTGGAGGAGGATTGGTGCAGCCTGGAGGGTCATTGAAACTCTCATG |
| | | | | TGCAGCCTCTGGATTCACCTTCAATGGCTACGCCATGAACTGGGTCCGCCAGGCTCCAGGAAAGG |
| | | | | GTTTGGAATGGGTTGCTCGCATAAGAAGTAAATATAATAATTATGCAACATATTATGCCGATTCA |
| | | | | GTGAAAGAGAGGTTCACCATCTCCAGAGATGATTCAAAAAACACTGCCTATCTACAAATGAACAA |
| | | | | CTTGAAAACTGAGGACACTGCCGTGTACTACTGTGTGAGACATAGGAACTTCGGTAATAGCTACT |
| | | | | TATCCTGGTTCGCTTACTGGGGCCAAGGGACTCTGGTCACCGTCTCCTCA |
| 125. | VL of E2M | artificial | aa | QTVVTQEPSLTVSPGGTVTLTCRSSTGAVTSGYYPNWVQQKPGQAPRGLIGATDMRPSGTPARFS |
| | | | | GSLLGGKAALTLSGVQPEDEAEYYCALWYSNRWVFGGGTKLTVL |
| 126. | VL of E2M | artificial | nt | CAGACTGTTGTGACTCAGGAACCTTCACTCACCGTATCACCTGGTGGAACAGTCACACTCACTTG |
| | | | | TCGCTCCTCGACTGGGGCTGTTACATCTGGCTACTACCCAAACTGGGTCCAACAAAAACCAGGTC |
| | | | | AGGCACCCCGTGGTCTAATAGGTGCCACTGACATGAGGCCCTCTGGTACTCCTGCCAGATTCTCA |
| | | | | GGCTCCCTGCTTGGAGGCAAGGCTGCCCTCACCCTCTCAGGGGTACAGCCAGAGGATGAGGCAGA |
| | | | | ATATTACTGTGCTCTATGGTACAGCAACCGCTGGGTGTTCGGTGGAGGAACCAAACTGACTGTCC |
| | | | | TA |
| 127. | VH-P of E2M | artificial | aa | EVQLLESGGGLVQPGGSLKLSCAASGFTFNGYAMNWVRQAPGKGLEWVARIRSKYNNYATYYADS |
| | | | | VKERFTISRDDSKNTAYLQMNNLKTEDTAVYYCVRHRNFGNSYLSWFAYWGQGTLVTVSS |
| 128. | VH-P of E2M | artificial | nt | GAGGTGCAGCTGCTCGAGTCTGGAGGAGGATTGGTGCAGCCTGGAGGGTCATTGAAACTCTCATG |
| | | | | TGCAGCCTCTGGATTCACCTTCAATGGCTACGCCATGAACTGGGTCCGCCAGGCTCCAGGAAAGG |
| | | | | GTTTGGAATGGGTTGCTCGCATAAGAAGTAAATATAATAATTATGCAACATATTATGCCGATTCA |
| | | | | GTGAAAGAGAGGTTCACCATCTCCAGAGATGATTCAAAAAACACTGCCTATCTACAAATGAACAA |
| | | | | CTTGAAAACTGAGGACACTGCCGTGTACTACTGTGTGAGACATAGGAACTTCGGTAATAGCTACT |
| | | | | TATCCTGGTTCGCTTACTGGGGCCAAGGGACTCTGGTCACCGTCTCCTCA |
| 129. | VL-P of E2M | artificial | aa | ELVVTQEPSLTVSPGGTVTLTCRSSTGAVTSGYYPNWVQQKPGQAPRGLIGATDMRPSGTPARFS |
| | | | | GSLLGGKAALTLSGVQPEDEAEYYCALWYSNRWVFGGGTKLTVL |
| 130. | VL-P of E2M | artificial | nt | GAGCTCGTTGTGACTCAGGAACCTTCACTCACCGTATCACCTGGTGGAACAGTCACACTCACTTG |
| | | | | TCGCTCCTCGACTGGGGCTGTTACATCTGGCTACTACCCAAACTGGGTCCAACAAAAACCAGGTC |
| | | | | AGGCACCCCGTGGTCTAATAGGTGCCACTGACATGAGGCCCTCTGGTACTCCTGCCAGATTCTCA |
| | | | | GGCTCCCTGCTTGGAGGCAAGGCTGCCCTCACCCTCTCAGGGGTACAGCCAGAGGATGAGGCAGA |
| | | | | ATATTACTGTGCTCTATGGTACAGCAACCGCTGGGTGTTCGGTGGAGGAACCAAACTGACTGTCC |
| | | | | TA |
| 131. | VH-VL of E2M | artificial | aa | EVQLVESGGGLVQPGGSLKLSCAASGFTFNGYAMNWVRQAPGKGLEWVARIRSKYNNYATYYADS |
| | | | | VKERFTISRDDSKNTAYLQMNNLKTEDTAVYYCVRHRNFGNSYLSWFAYWGQGTLVTVSSGGGGS |
| | | | | GGGGSGGGGSQTVVTQEPSLTVSPGGTVTLTCRSSTGAVTSGYYPNWVQQKPGQAPRGLIGATDM |
| | | | | RPSGTPARFSGSLLGGKAALTLSGVQPEDEAEYYCALWYSNRWVFGGGTKLTVL |
| 132. | VH-VL of E2M | artificial | nt | GAGGTGCAGCTGGTCGAGTCTGGAGGAGGATTGGTGCAGCCTGGAGGGTCATTGAAACTCTCATG |
| | | | | TGCAGCCTCTGGATTCACCTTCAATGGCTACGCCATGAACTGGGTCCGCCAGGCTCCAGGAAAGG |
| | | | | GTTTGGAATGGGTTGCTCGCATAAGAAGTAAATATAATAATTATGCAACATATTATGCCGATTCA |
| | | | | GTGAAAGAGAGGTTCACCATCTCCAGAGATGATTCAAAAAACACTGCCTATCTACAAATGAACAA |
| | | | | CTTGAAAACTGAGGACACTGCCGTGTACTACTGTGTGAGACATAGGAACTTCGGTAATAGCTACT |
| | | | | TATCCTGGTTCGCTTACTGGGGCCAAGGGACTCTGGTCACCGTCTCCTCAGGTGGTGGTGGTTCT |
| | | | | GGCGGCGGCGGCTCCGGTGGTGGTGGTTCTCAGACTGTTGTGACTCAGGAACCTTCACTCACCGT |
| | | | | ATCACCTGGTGGAACAGTCACACTCACTTGTCGCTCCTCGACTGGGGCTGTTACATCTGGCTACT |
| | | | | ACCCAAACTGGGTCCAACAAAAACCAGGTCAGGCACCCCGTGGTCTAATAGGTGCCACTGACATG |
| | | | | AGGCCCTCTGGTACTCCTGCCAGATTCTCAGGCTCCCTGCTTGGAGGCAAGGCTGCCCTCACCCT |
| | | | | CTCAGGGGTACAGCCAGAGGATGAGGCAGAATATTACTGTGCTCTATGGTACAGCAACCGCTGGG |
| | | | | TGTTCGGTGGAGGAACCAAACTGACTGTCCTA |
| 133. | VH-VL-P of | artificial | aa | EVQLLESGGGLVQPGGSLKLSCAASGFTFNGYAMNWVRQAPGKGLEWVARIRSKYNNYATYYADS |
| | E2M | | | VKERFTISRDDSKNTAYLQMNNLKTEDTAVYYCVRHRNFGNSYLSWFAYWGQGTLVTVSSGGGGS |
| | | | | GGGGSGGGGSELVVTQEPSLTVSPGGTVTLTCRSSTGAVTSGYYPNWVQQKPGQAPRGLIGATDM |
| | | | | RPSGTPARFSGSLLGGKAALTLSGVQPEDEAEYYCALWYSNRWVFGGGTKLTVL |
| 134. | VH-VL-P of | artificial | nt | GAGGTGCAGCTGCTCGAGTCTGGAGGAGGATTGGTGCAGCCTGGAGGGTCATTGAAACTCTCATG |
| | E2M | | | TGCAGCCTCTGGATTCACCTTCAATGGCTACGCCATGAACTGGGTCCGCCAGGCTCCAGGAAAGG |
| | | | | GTTTGGAATGGGTTGCTCGCATAAGAAGTAAATATAATAATTATGCAACATATTATGCCGATTCA |
| | | | | GTGAAAGAGAGGTTCACCATCTCCAGAGATGATTCAAAAAACACTGCCTATCTACAAATGAACAA |
| | | | | CTTGAAAACTGAGGACACTGCCGTGTACTACTGTGTGAGACATAGGAACTTCGGTAATAGCTACT |
| | | | | TATCCTGGTTCGCTTACTGGGGCCAAGGGACTCTGGTCACCGTCTCCTCAGGTGGTGGTGGTTCT |
| | | | | GGCGGCGGCGGCTCCGGTGGTGGTGGTTCTGAGCTCGTTGTGACTCAGGAACCTTCACTCACCGT |
| | | | | ATCACCTGGTGGAACAGTCACACTCACTTGTCGCTCCTCGACTGGGGCTGTTACATCTGGCTACT |
| | | | | ACCCAAACTGGGTCCAACAAAAACCAGGTCAGGCACCCCGTGGTCTAATAGGTGCCACTGACATG |
| | | | | AGGCCCTCTGGTACTCCTGCCAGATTCTCAGGCTCCCTGCTTGGAGGCAAGGCTGCCCTCACCCT |
| | | | | CTCAGGGGTACAGCCAGAGGATGAGGCAGAATATTACTGTGCTCTATGGTACAGCAACCGCTGGG |
| | | | | TGTTCGGTGGAGGAACCAAACTGACTGTCCTA |
| 135. | CDR-L1 of F7O | artificial | aa | GSSTGAVTSGYYPN |
| 136. | CDR-L2 of F7O | artificial | aa | GTKFLAP |
| 137. | CDR-L3 of F7O | artificial | aa | ALWYSNRWV |
| 138. | CDR-H1 of F7O | artificial | aa | VYAMN |
| 139. | CDR-H2 of F7O | artificial | aa | RIRSKYNNYATYYADSVKK |
| 140. | CDR-H3 of F7O | artificial | aa | HGNFGNSYISWWAY |
| 141. | VH of F7O | artificial | aa | EVQLVESGGGLVQPGGSLKLSCAASGFTFNVYAMNWVRQAPGKGLEWVARIRSKYNNYATYYADS |
| | | | | VKKRFTISRDDSKNTAYLQMNNLKTEDTAVYYCVRHGNFGNSYISWWAYWGQGTLVTVSS |
| 142. | VH of F7O | artificial | nt | GAGGTGCAGCTGGTCGAGTCTGGAGGAGGATTGGTGCAGCCTGGAGGGTCATTGAAACTCTCATG |
| | | | | TGCAGCCTCTGGATTCACCTTCAATGTGTACGCCATGAACTGGGTCCGCCAGGCTCCAGGAAAGG |
| | | | | GTTTGGAATGGGTTGCTCGCATAAGAAGTAAATATAATAATTATGCAACATATTATGCCGATTCA |
| | | | | GTGAAAAAGAGGTTCACCATCTCCAGAGATGATTCAAAAAACACTGCCTATCTACAAATGAACAA |
| | | | | CTTGAAAACTGAGGACACTGCCGTGTACTACTGTGTGAGACATGGGAACTTCGGTAATAGCTACA |
| | | | | TATCCTGGTGGGCTTACTGGGGCCAAGGGACTCTGGTCACCGTCTCCTCA |
| 143. | VL of F7O | artificial | aa | QTVVTQEPSLTVSPGGTVTLTCGSSTGAVTSGYYPNWVQQKPGQAPRGLIGGTKFLAPGTPARFS |
| | | | | GSLLGGKAALTLSGVQPEDEAEYYCALWYSNRWVFGGGTKLTVL |
| 144. | VL of F7O | artificial | nt | CAGACTGTTGTGACTCAGGAACCTTCACTCACCGTATCACCTGGTGGAACAGTCACACTCACTTG |
| | | | | TGGCTCCTCGACTGGGGCTGTTACATCTGGCTACTACCCAAACTGGGTCCAACAAAAACCAGGTC |
| | | | | AGGCACCCCGTGGTCTAATAGGTGGGACTAAGTTCCTCGCCCCCGGTACTCCTGCCAGATTCTCA |
| | | | | GGCTCCCTGCTTGGAGGCAAGGCTGCCCTCACCCTCTCAGGGGTACAGCCAGAGGATGAGGCAGA |
| | | | | ATATTACTGTGCTCTATGGTACAGCAACCGCTGGGTGTTCGGTGGAGGAACCAAACTGACTGTCC |
| | | | | TA |
| 145. | VH-P of F7O | artificial | aa | EVQLLESGGGLVQPGGSLKLSCAASGFTFNVYAMNWVRQAPGKGLEWVARIRSKYNNYATYYADS |
| | | | | VKKRFTISRDDSKNTAYLQMNNLKTEDTAVYYCVRHGNFGNSYISWWAYWGQGTLVTVSS |
| 146. | VH-P of F7O | artificial | nt | GAGGTGCAGCTGCTCGAGTCTGGAGGAGGATTGGTGCAGCCTGGAGGGTCATTGAAACTCTCATG |
| | | | | TGCAGCCTCTGGATTCACCTTCAATGTGTACGCCATGAACTGGGTCCGCCAGGCTCCAGGAAAGG |
| | | | | GTTTGGAATGGGTTGCTCGCATAAGAAGTAAATATAATAATTATGCAACATATTATGCCGATTCA |
| | | | | GTGAAAAAGAGGTTCACCATCTCCAGAGATGATTCAAAAAACACTGCCTATCTACAAATGAACAA |
| | | | | CTTGAAAACTGAGGACACTGCCGTGTACTACTGTGTGAGACATGGGAACTTCGGTAATAGCTACA |
| | | | | TATCCTGGTGGGCTTACTGGGGCCAAGGGACTCTGGTCACCGTCTCCTCA |
| 147. | VL-P of F7O | artificial | aa | ELVVTQEPSLTVSPGGTVTLTCGSSTGAVTSGYYPNWVQQKPGQAPRGLIGGTKFLAPGTPARFS |
| | | | | GSLLGGKAALTLSGVQPEDEAEYYCALWYSNRWVFGGGTKLTVL |
| 148. | VL-P of F7O | artificial | nt | GAGCTCGTTGTGACTCAGGAACCTTCACTCACCGTATCACCTGGTGGAACAGTCACACTCACTTG |
| | | | | TGGCTCCTCGACTGGGGCTGTTACATCTGGCTACTACCCAAACTGGGTCCAACAAAAACCAGGTC |
| | | | | AGGCACCCCGTGGTCTAATAGGTGGGACTAAGTTCCTCGCCCCCGGTACTCCTGCCAGATTCTCA |
| | | | | GGCTCCCTGCTTGGAGGCAAGGCTGCCCTCACCCTCTCAGGGGTACAGCCAGAGGATGAGGCAGA |
| | | | | ATATTACTGTGCTCTATGGTACAGCAACCGCTGGGTGTTCGGTGGAGGAACCAAACTGACTGTCC |
| | | | | TA |
| 149. | VH-VL of F7O | artificial | aa | EVQLVESGGGLVQPGGSLKLSCAASGFTFNVYAMNWVRQAPGKGLEWVARIRSKYNNYATYYADS |
| | | | | VKKRFTISRDDSKNTAYLQMNNLKTEDTAVYYCVRHGNFGNSYISWWAYWGQGTLVTVSSGGGGS |
| | | | | GGGGSGGGGSQTVVTQEPSLTVSPGGTVTLTCGSSTGAVTSGYYPNWVQQKPGQAPRGLIGGTKF |
| | | | | LAPGTPARFSGSLLGGKAALTLSGVQPEDEAEYYCALWYSNRWVFGGGTKLTVL |
| 150. | VH-VL of F7O | artificial | nt | GAGGTGCAGCTGGTCGAGTCTGGAGGAGGATTGGTGCAGCCTGGAGGGTCATTGAAACTCTCATG |
| | | | | TGCAGCCTCTGGATTCACCTTCAATGTGTACGCCATGAACTGGGTCCGCCAGGCTCCAGGAAAGG |
| | | | | GTTTGGAATGGGTTGCTCGCATAAGAAGTAAATATAATAATTATGCAACATATTATGCCGATTCA |
| | | | | GTGAAAAAGAGGTTCACCATCTCCAGAGATGATTCAAAAAACACTGCCTATCTACAAATGAACAA |
| | | | | CTTGAAAACTGAGGACACTGCCGTGTACTACTGTGTGAGACATGGGAACTTCGGTAATAGCTACA |
| | | | | TATCCTGGTGGGCTTACTGGGGCCAAGGGACTCTGGTCACCGTCTCCTCAGGTGGTGGTGGTTCT |
| | | | | GGCGGCGGCGGCTCCGGTGGTGGTGGTTCTCAGACTGTTGTGACTCAGGAACCTTCACTCACCGT |
| | | | | ATCACCTGGTGGAACAGTCACACTCACTTGTGGCTCCTCGACTGGGGCTGTTACATCTGGCTACT |
| | | | | ACCCAAACTGGGTCCAACAAAAACCAGGTCAGGCACCCCGTGGTCTAATAGGTGGGACTAAGTTC |
| | | | | CTCGCCCCCGGTACTCCTGCCAGATTCTCAGGCTCCCTGCTTGGAGGCAAGGCTGCCCTCACCCT |
| | | | | CTCAGGGGTACAGCCAGAGGATGAGGCAGAATATTACTGTGCTCTATGGTACAGCAACCGCTGGG |
| | | | | TGTTCGGTGGAGGAACCAAACTGACTGTCCTA |
| 151. | VH-VL-P of | artificial | aa | EVQLLESGGGLVQPGGSLKLSCAASGFTFNVYAMNWVRQAPGKGLEWVARIRSKYNNYATYYADS |
| | F7O | | | VKKRFTISRDDSKNTAYLQMNNLKTEDTAVYYCVRHGNFGNSYISWWAYWGQGTLVTVSSGGGGS |
| | | | | GGGGSGGGGSELVVTQEPSLTVSPGGTVTLTCGSSTGAVTSGYYPNWVQQKPGQAPRGLIGGTKF |
| | | | | LAPGTPARFSGSLLGGKAALTLSGVQPEDEAEYYCALWYSNRWVFGGGTKLTVL |
| 152. | VH-VL-P of | artificial | nt | GAGGTGCAGCTGCTCGAGTCTGGAGGAGGATTGGTGCAGCCTGGAGGGTCATTGAAACTCTCATG |
| | F7O | | | TGCAGCCTCTGGATTCACCTTCAATGTGTACGCCATGAACTGGGTCCGCCAGGCTCCAGGAAAGG |
| | | | | GTTTGGAATGGGTTGCTCGCATAAGAAGTAAATATAATAATTATGCAACATATTATGCCGATTCA |
| | | | | GTGAAAAAGAGGTTCACCATCTCCAGAGATGATTCAAAAAACACTGCCTATCTACAAATGAACAA |
| | | | | CTTGAAAACTGAGGACACTGCCGTGTACTACTGTGTGAGACATGGGAACTTCGGTAATAGCTACA |
| | | | | TATCCTGGTGGGCTTACTGGGGCCAAGGGACTCTGGTCACCGTCTCCTCAGGTGGTGGTGGTTCT |
| | | | | GGCGGCGGCGGCTCCGGTGGTGGTGGTTCTGAGCTCGTTGTGACTCAGGAACCTTCACTCACCGT |
| | | | | ATCACCTGGTGGAACAGTCACACTCACTTGTGGCTCCTCGACTGGGGCTGTTACATCTGGCTACT |
| | | | | ACCCAAACTGGGTCCAACAAAAACCAGGTCAGGCACCCCGTGGTCTAATAGGTGGGACTAAGTTC |
| | | | | CTCGCCCCCGGTACTCCTGCCAGATTCTCAGGCTCCCTGCTTGGAGGCAAGGCTGCCCTCACCCT |
| | | | | CTCAGGGGTACAGCCAGAGGATGAGGCAGAATATTACTGTGCTCTATGGTACAGCAACCGCTGGG |
| | | | | TGTTCGGTGGAGGAACCAAACTGACTGTCCTA |
| 153. | CDR-L1 of | artificial | aa | GSSTGAVTSGNYPN |
| | F12Q | | | |
| 154. | CDR-L2 of | artificial | aa | GTKFLAP |
| | F12Q | | | |
| 155. | CDR-L3 of | artificial | aa | VLWYSNRWV |
| | F12Q | | | |
| 156. | CDR-H1 of | artificial | aa | SYAMN |
| | F12Q | | | |
| 157. | CDR-H2 of | artificial | aa | RIRSKYNNYATYYADSVKG |
| | F12Q | | | |
| 158. | CDR-H3 of | artificial | aa | HGNFGNSYVSWWAY |
| | F12Q | | | |
| 159. | VH of F12Q | artificial | aa | EVQLVESGGGLVQPGGSLKLSCAASGFTFNSYAMNWVRQAPGKGLEWVARIRSKYNNYATYYADS |
| | | | | VKGRFTISRDDSKNTAYLQMNNLKTEDTAVYYCVRHGNFGNSYVSWWAYWGQGTLVTVSS |
| 160. | VH of F12Q | artificial | nt | GAGGTGCAGCTGGTCGAGTCTGGAGGAGGATTGGTGCAGCCTGGAGGGTCATTGAAACTCTCATG |
| | | | | TGCAGCCTCTGGATTCACCTTCAATAGCTACGCCATGAACTGGGTCCGCCAGGCTCCAGGAAAGG |
| | | | | GTTTGGAATGGGTTGCTCGCATAAGAAGTAAATATAATAATTATGCAACATATTATGCCGATTCA |
| | | | | GTGAAAGGCAGGTTCACCATCTCCAGAGATGATTCAAAAAACACTGCCTATCTACAAATGAACAA |
| | | | | CTTGAAAACTGAGGACACTGCCGTGTACTACTGTGTGAGACATGGGAACTTCGGTAATAGCTACG |
| | | | | TTTCCTGGTGGGCTTACTGGGGCCAAGGGACTCTGGTCACCGTCTCCTCA |
| 161. | VL of F12Q | artificial | aa | QTVVTQEPSLTVSPGGTVTLTCGSSTGAVTSGNYPNWVQQKPGQAPRGLIGGTKFLAPGTPARFS |
| | | | | GSLLGGKAALTLSGVQPEDEAEYYCVLWYSNRWVFGGGTKLTVL |
| 162. | VL of F12Q | artificial | nt | CAGACTGTTGTGACTCAGGAACCTTCACTCACCGTATCACCTGGTGGAACAGTCACACTCACTTG |
| | | | | TGGCTCCTCGACTGGGGCTGTTACATCTGGCAACTACCCAAACTGGGTCCAACAAAAACCAGGTC |
| | | | | AGGCACCCCGTGGTCTAATAGGTGGGACTAAGTTCCTCGCCCCCGGTACTCCTGCCAGATTCTCA |
| | | | | GGCTCCCTGCTTGGAGGCAAGGCTGCCCTCACCCTCTCAGGGGTACAGCCAGAGGATGAGGCAGA |
| | | | | ATATTACTGTGTTCTATGGTACAGCAACCGCTGGGTGTTCGGTGGAGGAACCAAACTGACTGTCC |
| | | | | TA |
| 163. | VH-P of F12Q | artificial | aa | EVQLLESGGGLVQPGGSLKLSCAASGFTFNSYAMNWVRQAPGKGLEWVARIRSKYNNYATYYADS |
| | | | | VKGRFTISRDDSKNTAYLQMNNLKTEDTAVYYCVRHGNFGNSYVSWWAYWGQGTLVTVSS |
| 164. | VH-P of F12Q | artificial | nt | GAGGTGCAGCTGCTCGAGTCTGGAGGAGGATTGGTGCAGCCTGGAGGGTCATTGAAACTCTCATG |
| | | | | TGCAGCCTCTGGATTCACCTTCAATAGCTACGCCATGAACTGGGTCCGCCAGGCTCCAGGAAAGG |
| | | | | GTTTGGAATGGGTTGCTCGCATAAGAAGTAAATATAATAATTATGCAACATATTATGCCGATTCA |
| | | | | GTGAAAGGCAGGTTCACCATCTCCAGAGATGATTCAAAAAACACTGCCTATCTACAAATGAACAA |
| | | | | CTTGAAAACTGAGGACACTGCCGTGTACTACTGTGTGAGACATGGGAACTTCGGTAATAGCTACG |
| | | | | TTTCCTGGTGGGCTTACTGGGGCCAAGGGACTCTGGTCACCGTCTCCTCA |
| 165. | VL-P of F12Q | artificial | aa | ELVVTQEPSLTVSPGGTVTLTCGSSTGAVTSGNYPNWVQQKPGQAPRGLIGGTKFLAPGTPARFS |
| | | | | GSLLGGKAALTLSGVQPEDEAEYYCVLWYSNRWVFGGGTKLTVL |
| 166. | VL-P of F12Q | artificial | nt | GAGCTCGTTGTGACTCAGGAACCTTCACTCACCGTATCACCTGGTGGAACAGTCACACTCACTTG |
| | | | | TGGCTCCTCGACTGGGGCTGTTACATCTGGCAACTACCCAAACTGGGTCCAACAAAAACCAGGTC |
| | | | | AGGCACCCCGTGGTCTAATAGGTGGGACTAAGTTCCTCGCCCCCGGTACTCCTGCCAGATTCTCA |
| | | | | GGCTCCCTGCTTGGAGGCAAGGCTGCCCTCACCCTCTCAGGGGTACAGCCAGAGGATGAGGCAGA |
| | | | | ATATTACTGTGTTCTATGGTACAGCAACCGCTGGGTGTTCGGTGGAGGAACCAAACTGACTGTCC |
| | | | | TA |
| 167. | VH-VL of F12Q | artificial | aa | EVQLVESGGGLVQPGGSLKLSCAASGFTFNSYAMNWVRQAPGKGLEWVARIRSKYNNYATYYADS |
| | | | | VKGRFTISRDDSKNTAYLQMNNLKTEDTAVYYCVRHGNFGNSYVSWWAYWGQGTLVTVSSGGGGS |
| | | | | GGGGSGGGGSQTVVTQEPSLTVSPGGTVTLTCGSSTGAVTSGNYPNWVQQKPGQAPRGLIGGTKF |
| | | | | LAPGTPARFSGSLLGGKAALTLSGVQPEDEAEYYCVLWYSNRWVFGGGTKLTVL |
| 168. | VH-VL of F12Q | artificial | nt | GAGGTGCAGCTGGTCGAGTCTGGAGGAGGATTGGTGCAGCCTGGAGGGTCATTGAAACTCTCATG |
| | | | | TGCAGCCTCTGGATTCACCTTCAATAGCTACGCCATGAACTGGGTCCGCCAGGCTCCAGGAAAGG |
| | | | | GTTTGGAATGGGTTGCTCGCATAAGAAGTAAATATAATAATTATGCAACATATTATGCCGATTCA |
| | | | | GTGAAAGGCAGGTTCACCATCTCCAGAGATGATTCAAAAAACACTGCCTATCTACAAATGAACAA |
| | | | | CTTGAAAACTGAGGACACTGCCGTGTACTACTGTGTGAGACATGGGAACTTCGGTAATAGCTACG |
| | | | | TTTCCTGGTGGGCTTACTGGGGCCAAGGGACTCTGGTCACCGTCTCCTCAGGTGGTGGTGGTTCT |
| | | | | GGCGGCGGCGGCTCCGGTGGTGGTGGTTCTCAGACTGTTGTGACTCAGGAACCTTCACTCACCGT |
| | | | | ATCACCTGGTGGAACAGTCACACTCACTTGTGGCTCCTCGACTGGGGCTGTTACATCTGGCAACT |
| | | | | ACCCAAACTGGGTCCAACAAAAACCAGGTCAGGCACCCCGTGGTCTAATAGGTGGGACTAAGTTC |
| | | | | CTCGCCCCCGGTACTCCTGCCAGATTCTCAGGCTCCCTGCTTGGAGGCAAGGCTGCCCTCACCCT |
| | | | | CTCAGGGGTACAGCCAGAGGATGAGGCAGAATATTACTGTGTTCTATGGTACAGCAACCGCTGGG |
| | | | | TGTTCGGTGGAGGAACCAAACTGACTGTCCTA |
| 169. | VH-VL-P | artificial | aa | EVQLLESGGGLVQPGGSLKLSCAASGFTFNSYAMNWVRQAPGKGLEWVARIRSKYNNYATYYADS |
| | of F12Q | | | VKGRFTISRDDSKNTAYLQMNNLKTEDTAVYYCVRHGNFGNSYVSWWAYWGQGTLVTVSSGGGGS |
| | | | | GGGGSGGGGSELVVTQEPSLTVSPGGTVTLTCGSSTGAVTSGNYPNWVQQKPGQAPRGLIGGTKF |
| | | | | LAPGTPARFSGSLLGGKAALTLSGVQPEDEAEYYCVLWYSNRWVFGGGTKLTVL |
| 170. | VH-VL-P | artificial | nt | GAGGTGCAGCTGCTCGAGTCTGGAGGAGGATTGGTGCAGCCTGGAGGGTCATTGAAACTCTCATG |
| | of F12Q | | | TGCAGCCTCTGGATTCACCTTCAATAGCTACGCCATGAACTGGGTCCGCCAGGCTCCAGGAAAGG |
| | | | | GTTTGGAATGGGTTGCTCGCATAAGAAGTAAATATAATAATTATGCAACATATTATGCCGATTCA |
| | | | | GTGAAAGGCAGGTTCACCATCTCCAGAGATGATTCAAAAAACACTGCCTATCTACAAATGAACAA |
| | | | | CTTGAAAACTGAGGACACTGCCGTGTACTACTGTGTGAGACATGGGAACTTCGGTAATAGCTACG |
| | | | | TTTCCTGGTGGGCTTACTGGGGCCAAGGGACTCTGGTCACCGTCTCCTCAGGTGGTGGTGGTTCT |
| | | | | GGCGGCGGCGGCTCCGGTGGTGGTGGTTCTGAGCTCGTTGTGACTCAGGAACCTTCACTCACCGT |
| | | | | ATCACCTGGTGGAACAGTCACACTCACTTGTGGCTCCTCGACTGGGGCTGTTACATCTGGCAACT |
| | | | | ACCCAAACTGGGTCCAACAAAAACCAGGTCAGGCACCCCGTGGTCTAATAGGTGGGACTAAGTTC |
| | | | | CTCGCCCCCGGTACTCCTGCCAGATTCTCAGGCTCCCTGCTTGGAGGCAAGGCTGCCCTCACCCT |
| | | | | CTCAGGGGTACAGCCAGAGGATGAGGCAGAATATTACTGTGTTCTATGGTACAGCAACCGCTGGG |
| | | | | TGTTCGGTGGAGGAACCAAACTGACTGTCCTA |
| 171. | CDR-L1 of I2C | artificial | aa | GSSTGAVTSGNYPN |
| 172. | CDR-L2 of I2C | artificial | aa | GTKFLAP |
| 173. | CDR-L3 of I2C | artificial | aa | VLWYSNRWV |
| 174. | CDR-H1 of I2C | artificial | aa | KYAMN |
| 175. | CDR-H2 of I2C | artificial | aa | RIRSKYNNYATYYADSVKD |
| 176. | CDR-H3 of I2C | artificial | aa | HGNFGNSYISYWAY |
| 177. | VH of I2C | artificial | aa | EVQLVESGGGLVQPGGSLKLSCAASGFTFNKYAMNWVRQAPGKGLEWVARIRSKYNNYATYYADS |
| | | | | VKDRFTISRDDSKNTAYLQMNNLKTEDTAVYYCVRHGNFGNSYISYWAYWGQGTLVTVSS |
| 178. | VH of I2C | artificial | nt | GAGGTGCAGCTGGTCGAGTCTGGAGGAGGATTGGTGCAGCCTGGAGGGTCATTGAAACTCTCATG |
| | | | | TGCAGCCTCTGGATTCACCTTCAATAAGTACGCCATGAACTGGGTCCGCCAGGCTCCAGGAAAGG |
| | | | | GTTTGGAATGGGTTGCTCGCATAAGAAGTAAATATAATAATTATGCAACATATTATGCCGATTCA |
| | | | | GTGAAAGACAGGTTCACCATCTCCAGAGATGATTCAAAAAACACTGCCTATCTACAAATGAACAA |
| | | | | CTTGAAAACTGAGGACACTGCCGTGTACTACTGTGTGAGACATGGGAACTTCGGTAATAGCTACA |
| | | | | TATCCTACTGGGCTTACTGGGGCCAAGGGACTCTGGTCACCGTCTCCTCA |
| 179. | VL of I2C | artificial | aa | QTVVTQEPSLTVSPGGTVTLTCGSSTGAVTSGNYPNWVQQKPGQAPRGLIGGTKFLAPGTPARFS |
| | | | | GSLLGGKAALTLSGVQPEDEAEYYCVLWYSNRWVFGGGTKLTVL |
| 180. | VL of I2C | artificial | nt | CAGACTGTTGTGACTCAGGAACCTTCACTCACCGTATCACCTGGTGGAACAGTCACACTCACTTG |
| | | | | TGGCTCCTCGACTGGGGCTGTTACATCTGGCAACTACCCAAACTGGGTCCAACAAAAACCAGGTC |
| | | | | AGGCACCCCGTGGTCTAATAGGTGGGACTAAGTTCCTCGCCCCCGGTACTCCTGCCAGATTCTCA |
| | | | | GGCTCCCTGCTTGGAGGCAAGGCTGCCCTCACCCTCTCAGGGGTACAGCCAGAGGATGAGGCAGA |
| | | | | ATATTACTGTGTTCTATGGTACAGCAACCGCTGGGTGTTCGGTGGAGGAACCAAACTGACTGTCC |
| | | | | TA |
| 181. | VH-P of I2C | artificial | aa | EVQLLESGGGLVQPGGSLKLSCAASGFTFNKYAMNWVRQAPGKGLEWVARIRSKYNNYATYYADS |
| | | | | VKDRFTISRDDSKNTAYLQMNNLKTEDTAVYYCVRHGNFGNSYISYWAYWGQGTLVTVSS |
| 182. | VH-P of I2C | artificial | nt | GAGGTGCAGCTGCTCGAGTCTGGAGGAGGATTGGTGCAGCCTGGAGGGTCATTGAAACTCTCATG |
| | | | | TGCAGCCTCTGGATTCACCTTCAATAAGTACGCCATGAACTGGGTCCGCCAGGCTCCAGGAAAGG |
| | | | | GTTTGGAATGGGTTGCTCGCATAAGAAGTAAATATAATAATTATGCAACATATTATGCCGATTCA |
| | | | | GTGAAAGACAGGTTCACCATCTCCAGAGATGATTCAAAAAACACTGCCTATCTACAAATGAACAA |
| | | | | CTTGAAAACTGAGGACACTGCCGTGTACTACTGTGTGAGACATGGGAACTTCGGTAATAGCTACA |
| | | | | TATCCTACTGGGCTTACTGGGGCCAAGGGACTCTGGTCACCGTCTCCTCA |
| 183. | VL-P of I2C | artificial | aa | ELVVTQEPSLTVSPGGTVTLTCGSSTGAVTSGNYPNWVQQKPGQAPRGLIGGTKFLAPGTPARFS |
| | | | | GSLLGGKAALTLSGVQPEDEAEYYCVLWYSNRWVFGGGTKLTVL |
| 184. | VL-P of I2C | artificial | nt | GAGCTCGTTGTGACTCAGGAACCTTCACTCACCGTATCACCTGGTGGAACAGTCACACTCACTTG |
| | | | | TGGCTCCTCGACTGGGGCTGTTACATCTGGCAACTACCCAAACTGGGTCCAACAAAAACCAGGTC |
| | | | | AGGCACCCCGTGGTCTAATAGGTGGGACTAAGTTCCTCGCCCCCGGTACTCCTGCCAGATTCTCA |
| | | | | GGCTCCCTGCTTGGAGGCAAGGCTGCCCTCACCCTCTCAGGGGTACAGCCAGAGGATGAGGCAGA |
| | | | | ATATTACTGTGTTCTATGGTACAGCAACCGCTGGGTGTTCGGTGGAGGAACCAAACTGACTGTCC |
| | | | | TA |
| 185. | VH-VL of I2C | artificial | aa | EVQLVESGGGLVQPGGSLKLSCAASGFTFNKYAMNWVRQAPGKGLEWVARIRSKYNNYATYYADS |
| | | | | VKDRFTISRDDSKNTAYLQMNNLKTEDTAVYYCVRHGNFGNSYISYWAYWGQGTLVTVSSGGGGS |
| | | | | GGGGSGGGGSQTVVTQEPSLTVSPGGTVTLTCGSSTGAVTSGNYPNWVQQKPGQAPRGLIGGTKF |
| | | | | LAPGTPARFSGSLLGGKAALTLSGVQPEDEAEYYCVLWYSNRWVFGGGTKLTVL |
| 186. | VH-VL of I2C | artificial | nt | GAGGTGCAGCTGGTCGAGTCTGGAGGAGGATTGGTGCAGCCTGGAGGGTCATTGAAACTCTCATG |
| | | | | TGCAGCCTCTGGATTCACCTTCAATAAGTACGCCATGAACTGGGTCCGCCAGGCTCCAGGAAAGG |
| | | | | GTTTGGAATGGGTTGCTCGCATAAGAAGTAAATATAATAATTATGCAACATATTATGCCGATTCA |
| | | | | GTGAAAGACAGGTTCACCATCTCCAGAGATGATTCAAAAAACACTGCCTATCTACAAATGAACAA |
| | | | | CTTGAAAACTGAGGACACTGCCGTGTACTACTGTGTGAGACATGGGAACTTCGGTAATAGCTACA |
| | | | | TATCCTACTGGGCTTACTGGGGCCAAGGGACTCTGGTCACCGTCTCCTCAGGTGGTGGTGGTTCT |
| | | | | GGCGGCGGCGGCTCCGGTGGTGGTGGTTCTCAGACTGTTGTGACTCAGGAACCTTCACTCACCGT |
| | | | | ATCACCTGGTGGAACAGTCACACTCACTTGTGGCTCCTCGACTGGGGCTGTTACATCTGGCAACT |
| | | | | ACCCAAACTGGGTCCAACAAAAACCAGGTCAGGCACCCCGTGGTCTAATAGGTGGGACTAAGTTC |
| | | | | CTCGCCCCCGGTACTCCTGCCAGATTCTCAGGCTCCCTGCTTGGAGGCAAGGCTGCCCTCACCCT |
| | | | | CTCAGGGGTACAGCCAGAGGATGAGGCAGAATATTACTGTGTTCTATGGTACAGCAACCGCTGGG |
| | | | | TGTTCGGTGGAGGAACCAAACTGACTGTCCTA |
| 187. | VH-VL-P | artificial | aa | EVQLLESGGGLVQPGGSLKLSCAASGFTFNKYAMNWVRQAPGKGLEWVARIRSKYNNYATYYADS |
| | of I2C | | | VKDRFTISRDDSKNTAYLQMNNLKTEDTAVYYCVRHGNFGNSYISYWAYWGQGTLVTVSSGGGGS |
| | | | | GGGGSGGGGSELVVTQEPSLTVSPGGTVTLTCGSSTGAVTSGNYPNWVQQKPGQAPRGLIGGTKF |
| | | | | LAPGTPARFSGSLLGGKAALTLSGVQPEDEAEYYCVLWYSNRWVFGGGTKLTVL |
| 188. | VH-VL-P | artificial | nt | GAGGTGCAGCTGCTCGAGTCTGGAGGAGGATTGGTGCAGCCTGGAGGGTCATTGAAACTCTCATG |
| | of I2C | | | TGCAGCCTCTGGATTCACCTTCAATAAGTACGCCATGAACTGGGTCCGCCAGGCTCCAGGAAAGG |
| | | | | GTTTGGAATGGGTTGCTCGCATAAGAAGTAAATATAATAATTATGCAACATATTATGCCGATTCA |
| | | | | GTGAAAGACAGGTTCACCATCTCCAGAGATGATTCAAAAAACACTGCCTATCTACAAATGAACAA |
| | | | | CTTGAAAACTGAGGACACTGCCGTGTACTACTGTGTGAGACATGGGAACTTCGGTAATAGCTACA |
| | | | | TATCCTACTGGGCTTACTGGGGCCAAGGGACTCTGGTCACCGTCTCCTCAGGTGGTGGTGGTTCT |
| | | | | GGCGGCGGCGGCTCCGGTGGTGGTGGTTCTGAGCTCGTTGTGACTCAGGAACCTTCACTCACCGT |
| | | | | ATCACCTGGTGGAACAGTCACACTCACTTGTGGCTCCTCGACTGGGGCTGTTACATCTGGCAACT |
| | | | | ACCCAAACTGGGTCCAACAAAAACCAGGTCAGGCACCCCGTGGTCTAATAGGTGGGACTAAGTTC |
| | | | | CTCGCCCCCGGTACTCCTGCCAGATTCTCAGGCTCCCTGCTTGGAGGCAAGGCTGCCCTCACCCT |
| | | | | CTCAGGGGTACAGCCAGAGGATGAGGCAGAATATTACTGTGTTCTATGGTACAGCAACCGCTGGG |
| | | | | TGTTCGGTGGAGGAACCAAACTGACTGTCCTA |
| 189. | MCSP-G4 | artificial | aa | QVQLVQSGAEVKRPGASMKVSCKASGYTFTNYYIHWVRQAPGQGLEWMGWINPNSGATNYAQKFQ |
| | VH-VL x | | | GRVTMTRDTSTSTVYMELSSLRSEDTAVYYCAKSWVSWFASWGQGTLVTVSSGGGGSGGGGSGGG |
| | H2C VH-VL | | | GSDIVMTQSPDSLAVSLGERATINCKSSQSVLNSSNNRNYLAWYQQKPGQPPKLLIYWASTRESG |
| | | | | VPDRFSGSGSGTDFTLTISGLQAEDVAVYYCQQHYSTPFTFGPGTKVDIKSGGGGSEVQLVESGG |
| | | | | GLVQPGGSLKLSCAASGFTFNKYAMNWVRQAPGKGLEWVARIRSKYNNYATYYADSVKDRFTISR |
| | | | | DDSKNTAYLQMNNLKTEDTAVYYCVRHGNFGNSYISYWAYWGQGTLVTVSSGGGGSGGGGSGGGG |
| | | | | SQTVVTQEPSLTVSPGGTVTLTCGSSTGAVTSGYYPNWVQQKPGQAPRGLIGGTKFLAPGTPARF |
| | | | | SGSLLGGKAALTLSGVQPEDEAEYYCALWYSNRWVFGGGTKLTVL |
| 190. | MCSP-G4 | artificial | nt | CAGGTGCAGCTGGTCCAGTCTGGGGCTGAGGTGAAGAGGCCTGGGGCCTCAATGAAGGTCTCCTG |
| | VH-VL x | | | CAAGGCTTCTGGGTACACCTTCACCAACTACTATATACACTGGGTGCGACAGGCCCCTGGACAAG |
| | H2C VH-VL | | | GTCTTGAGTGGATGGGTTGGATCAACCCTAACAGTGGTGCCACAAACTATGCACAGAAGTTCCAG |
| | | | | GGCAGAGTCACCATGACCAGGGACACGTCCACGAGCACAGTCTACATGGAGCTGAGCAGCCTGAG |
| | | | | ATCTGAGGACACGGCCGTGTATTACTGTGCGAAATCCTGGGTCTCCTGGTTTGCTTCCTGGGGTC |
| | | | | AAGGAACCTTGGTCACCGTCTCCTCAGGTGGTGGTGGTTCTGGCGGCGGCGGCTCCGGTGGTGGT |
| | | | | GGTTCTGATATCGTGATGACCCAGTCTCCAGACTCCCTGGCTGTGTCTCTGGGCGAGAGGGCCAC |
| | | | | CATCAACTGCAAGTCCAGCCAGAGTGTTTTAAACAGCTCCAACAATAGGAACTACTTAGCTTGGT |
| | | | | ACCAGCAGAAACCAGGACAGCCTCCTAAGCTGCTCATTTACTGGGCATCTACCCGGGAATCCGGG |
| | | | | GTCCCTGACCGATTCAGTGGCAGCGGGTCTGGGACAGATTTCACTCTCACCATCAGTGGCCTGCA |
| | | | | GGCTGAAGATGTGGCAGTTTATTACTGTCAGCAACATTATAGTACTCCATTCACTTTTGGCCCTG |
| | | | | GGACCAAAGTGGATATCAAATCCGGAGGTGGTGGATCCGAGGTGCAGCTGGTCGAGTCTGGAGGA |
| | | | | GGATTGGTGCAGCCTGGAGGGTCATTGAAACTCTCATGTGCAGCCTCTGGATTCACCTTCAATAA |
| | | | | GTACGCCATGAACTGGGTCCGCCAGGCTCCAGGAAAGGGTTTGGAATGGGTTGCTCGCATAAGAA |
| | | | | GTAAATATAATAATTATGCAACATATTATGCCGATTCAGTGAAAGACAGGTTCACCATCTCCAGA |
| | | | | GATGATTCAAAAAACACTGCCTATCTACAAATGAACAACTTGAAAACTGAGGACACTGCCGTGTA |
| | | | | CTACTGTGTGAGACATGGGAACTTCGGTAATAGCTACATATCCTACTGGGCTTACTGGGGCCAAG |
| | | | | GGACTCTGGTCACCGTCTCCTCAGGTGGTGGTGGTTCTGGCGGCGGCGGCTCCGGTGGTGGTGGT |
| | | | | TCTCAGACTGTTGTGACTCAGGAACCTTCACTCACCGTATCACCTGGTGGAACAGTCACACTCAC |
| | | | | TTGTGGCTCCTCGACTGGGGCTGTTACATCTGGCTACTACCCAAACTGGGTCCAACAAAAACCAG |
| | | | | GTCAGGCACCCCGTGGTCTAATAGGTGGGACTAAGTTCCTCGCCCCCGGTACTCCTGCCAGATTC |
| | | | | TCAGGCTCCCTGCTTGGAGGCAAGGCTGCCCTCACCCTCTCAGGGGTACAGCCAGAGGATGAGGC |
| | | | | AGAATATTACTGTGCTCTATGGTACAGCAACCGCTGGGTGTTCGGTGGAGGAACCAAACTGACTG |
| | | | | TCCTA |
| 191. | MCSP-G4 | artificial | aa | QVQLVQSGAEVKRPGASMKVSCKASGYTFTNYYIHWVRQAPGQGLEWMGWINPNSGATNYAQKFQ |
| | VH-VL x | | | GRVTMTRDTSTSTVYMELSSLRSEDTAVYYCAKSWVSWFASWGQGTLVTVSSGGGGSGGGGSGGG |
| | F12Q VH-VL | | | GSDIVMTQSPDSLAVSLGERATINCKSSQSVLNSSNNRNYLAWYQQKPGQPPKLLIYWASTRESG |
| | | | | VPDRFSGSGSGTDFTLTISGLQAEDVAVYYCQQHYSTPFTFGPGTKVDIKSGGGGSEVQLVESGG |
| | | | | GLVQPGGSLKLSCAASGFTFNSYAMNWVRQAPGKGLEWVARIRSKYNNYATYYADSVKGRFTISR |
| | | | | DDSKNTAYLQMNNLKTEDTAVYYCVRHGNFGNSYVSWWAYWGQGTLVTVSSGGGGSGGGGSGGGG |
| | | | | SQTVVTQEPSLTVSPGGTVTLTCGSSTGAVTSGNYPNWVQQKPGQAPRGLIGGTKFLAPGTPARF |
| | | | | SGSLLGGKAALTLSGVQPEDEAEYYCVLWYSNRWVFGGGTKLTVL |
| 192. | MCSP-G4 | artificial | nt | CAGGTGCAGCTGGTCCAGTCTGGGGCTGAGGTGAAGAGGCCTGGGGCCTCAATGAAGGTCTCCTG |
| | VH-VL x | | | CAAGGCTTCTGGGTACACCTTCACCAACTACTATATACACTGGGTGCGACAGGCCCCTGGACAAG |
| | F12Q VH-VL | | | GTCTTGAGTGGATGGGTTGGATCAACCCTAACAGTGGTGCCACAAACTATGCACAGAAGTTCCAG |
| | | | | GGCAGAGTCACCATGACCAGGGACACGTCCACGAGCACAGTCTACATGGAGCTGAGCAGCCTGAG |
| | | | | ATCTGAGGACACGGCCGTGTATTACTGTGCGAAATCCTGGGTCTCCTGGTTTGCTTCCTGGGGTC |
| | | | | AAGGAACCTTGGTCACCGTCTCCTCAGGTGGTGGTGGTTCTGGCGGCGGCGGCTCCGGTGGTGGT |
| | | | | GGTTCTGATATCGTGATGACCCAGTCTCCAGACTCCCTGGCTGTGTCTCTGGGCGAGAGGGCCAC |
| | | | | CATCAACTGCAAGTCCAGCCAGAGTGTTTTAAACAGCTCCAACAATAGGAACTACTTAGCTTGGT |
| | | | | ACCAGCAGAAACCAGGACAGCCTCCTAAGCTGCTCATTTACTGGGCATCTACCCGGGAATCCGGG |
| | | | | GTCCCTGACCGATTCAGTGGCAGCGGGTCTGGGACAGATTTCACTCTCACCATCAGTGGCCTGCA |
| | | | | GGCTGAAGATGTGGCAGTTTATTACTGTCAGCAACATTATAGTACTCCATTCACTTTTGGCCCTG |
| | | | | GGACCAAAGTGGATATCAAATCCGGAGGTGGTGGATCCGAGGTGCAGCTGGTCGAGTCTGGAGGA |
| | | | | GGATTGGTGCAGCCTGGAGGGTCATTGAAACTCTCATGTGCAGCCTCTGGATTCACCTTCAATAG |
| | | | | CTACGCCATGAACTGGGTCCGCCAGGCTCCAGGAAAGGGTTTGGAATGGGTTGCTCGCATAAGAA |
| | | | | GTAAATATAATAATTATGCAACATATTATGCCGATTCAGTGAAAGGCAGGTTCACCATCTCCAGA |
| | | | | GATGATTCAAAAAACACTGCCTATCTACAAATGAACAACTTGAAAACTGAGGACACTGCCGTGTA |
| | | | | CTACTGTGTGAGACATGGGAACTTCGGTAATAGCTACGTTTCCTGGTGGGCTTACTGGGGCCAAG |
| | | | | GGACTCTGGTCACCGTCTCCTCAGGTGGTGGTGGTTCTGGCGGCGGCGGCTCCGGTGGTGGTGGT |
| | | | | TCTCAGACTGTTGTGACTCAGGAACCTTCACTCACCGTATCACCTGGTGGAACAGTCACACTCAC |
| | | | | TTGTGGCTCCTCGACTGGGGCTGTTACATCTGGCAACTACCCAAACTGGGTCCAACAAAAACCAG |
| | | | | GTCAGGCACCCCGTGGTCTAATAGGTGGGACTAAGTTCCTCGCCCCCGGTACTCCTGCCAGATTC |
| | | | | TCAGGCTCCCTGCTTGGAGGCAAGGCTGCCCTCACCCTCTCAGGGGTACAGCCAGAGGATGAGGC |
| | | | | AGAATATTACTGTGTTCTATGGTACAGCAACCGCTGGGTGTTCGGTGGAGGAACCAAACTGACTG |
| | | | | TCCTA |
| 193. | MCSP-G4 | artificial | aa | QVQLVQSGAEVKRPGASMKVSCKASGYTFTNYYIHWVRQAPGQGLEWMGWINPNSGATNYAQKFQ |
| | VH-VL x | | | GRVTMTRDTSTSTVYMELSSLRSEDTAVYYCAKSWVSWFASWGQGTLVTVSSGGGGSGGGGSGGG |
| | I2C VH-VL | | | GSDIVMTQSPDSLAVSLGERATINCKSSQSVLNSSNNRNYLAWYQQKPGQPPKLLIYWASTRESG |
| | | | | VPDRFSGSGSGTDFTLTISGLQAEDVAVYYCQQHYSTPFTFGPGTKVDIKSGGGGSEVQLVESGG |
| | | | | GLVQPGGSLKLSCAASGFTFNKYAMNWVRQAPGKGLEWVARIRSKYNNYATYYADSVKDRFTISR |
| | | | | DDSKNTAYLQMNNLKTEDTAVYYCVRHGNFGNSYISYWAYWGQGTLVTVSSGGGGSGGGGSGGGG |
| | | | | SQTVVTQEPSLTVSPGGTVTLTCGSSTGAVTSGNYPNWVQQKPGQAPRGLIGGTKFLAPGTPARF |
| | | | | SGSLLGGKAALTLSGVQPEDEAEYYCVLWYSNRWVFGGGTKLTVL |
| 194. | MCSP-G4 | artificial | nt | CAGGTGCAGCTGGTCCAGTCTGGGGCTGAGGTGAAGAGGCCTGGGGCCTCAATGAAGGTCTCCTG |
| | VH-VL x | | | CAAGGCTTCTGGGTACACCTTCACCAACTACTATATACACTGGGTGCGACAGGCCCCTGGACAAG |
| | I2C VH-VL | | | GTCTTGAGTGGATGGGTTGGATCAACCCTAACAGTGGTGCCACAAACTATGCACAGAAGTTCCAG |
| | | | | GGCAGAGTCACCATGACCAGGGACACGTCCACGAGCACAGTCTACATGGAGCTGAGCAGCCTGAG |
| | | | | ATCTGAGGACACGGCCGTGTATTACTGTGCGAAATCCTGGGTCTCCTGGTTTGCTTCCTGGGGTC |
| | | | | AAGGAACCTTGGTCACCGTCTCCTCAGGTGGTGGTGGTTCTGGCGGCGGCGGCTCCGGTGGTGGT |
| | | | | GGTTCTGATATCGTGATGACCCAGTCTCCAGACTCCCTGGCTGTGTCTCTGGGCGAGAGGGCCAC |
| | | | | CATCAACTGCAAGTCCAGCCAGAGTGTTTTAAACAGCTCCAACAATAGGAACTACTTAGCTTGGT |
| | | | | ACCAGCAGAAACCAGGACAGCCTCCTAAGCTGCTCATTTACTGGGCATCTACCCGGGAATCCGGG |
| | | | | GTCCCTGACCGATTCAGTGGCAGCGGGTCTGGGACAGATTTCACTCTCACCATCAGTGGCCTGCA |
| | | | | GGCTGAAGATGTGGCAGTTTATTACTGTCAGCAACATTATAGTACTCCATTCACTTTTGGCCCTG |
| | | | | GGACCAAAGTGGATATCAAATCCGGAGGTGGTGGATCCGAGGTGCAGCTGGTCGAGTCTGGAGGA |
| | | | | GGATTGGTGCAGCCTGGAGGGTCATTGAAACTCTCATGTGCAGCCTCTGGATTCACCTTCAATAA |
| | | | | GTACGCCATGAACTGGGTCCGCCAGGCTCCAGGAAAGGGTTTGGAATGGGTTGCTCGCATAAGAA |
| | | | | GTAAATATAATAATTATGCAACATATTATGCCGATTCAGTGAAAGACAGGTTCACCATCTCCAGA |
| | | | | GATGATTCAAAAAACACTGCCTATCTACAAATGAACAACTTGAAAACTGAGGACACTGCCGTGTA |
| | | | | CTACTGTGTGAGACATGGGAACTTCGGTAATAGCTACATATCCTACTGGGCTTACTGGGGCCAAG |
| | | | | GGACTCTGGTCACCGTCTCCTCAGGTGGTGGTGGTTCTGGCGGCGGCGGCTCCGGTGGTGGTGGT |
| | | | | TCTCAGACTGTTGTGACTCAGGAACCTTCACTCACCGTATCACCTGGTGGAACAGTCACACTCAC |
| | | | | TTGTGGCTCCTCGACTGGGGCTGTTACATCTGGCAACTACCCAAACTGGGTCCAACAAAAACCAG |
| | | | | GTCAGGCACCCCGTGGTCTAATAGGTGGGACTAAGTTCCTCGCCCCCGGTACTCCTGCCAGATTC |
| | | | | TCAGGCTCCCTGCTTGGAGGCAAGGCTGCCCTCACCCTCTCAGGGGTACAGCCAGAGGATGAGGC |
| | | | | AGAATATTACTGTGTTCTATGGTACAGCAACCGCTGGGTGTTCGGTGGAGGAACCAAACTGACTG |
| | | | | TCCTA |
| 195. | MCSP-G4 | artificial | aa | QVQLVQSGAEVKRPGASMKVSCKASGYTFTNYYIHWVRQAPGQGLEWMGWINPNSGATNYAQKFQ |
| | VH-VL-P x | | | GRVTMTRDTSTSTVYMELSSLRSEDTAVYYCAKSWVSWFASWGQGTLVTVSSGGGGSGGGGSGGG |
| | F6A VH-VL-P | | | GSELVMTQSPDSLAVSLGERATINCKSSQSVLNSSNNRNYLAWYQQKPGQPPKLLIYWASTRESG |
| | | | | VPDRFSGSGSGTDFTLTISGLQAEDVAVYYCQQHYSTPFTFGPGTKVDIKSGGGGSEVQLLESGG |
| | | | | GLVQPGGSLKLSCAASGFTFNIYAMNWVRQAPGKGLEWVARIRSKYNNYATYYADSVKSRFTISR |
| | | | | DDSKNTAYLQMNNLKTEDTAVYYCVRHGNFGNSYVSFFAYWGQGTLVTVSSGGGGSGGGGSGGGG |
| | | | | SELVVTQEPSLTVSPGGTVTLTCGSSTGAVTSGYYPNWVQQKPGQAPRGLIGGTKFLAPGTPARF |
| | | | | SGSLLGGKAALTLSGVQPEDEAEYYCALWYSNRWVFGGGTKLTVL |
| 196. | MCSP-G4 | artificial | nt | CAGGTGCAGCTGGTCCAGTCTGGGGCTGAGGTGAAGAGGCCTGGGGCCTCAATGAAGGTCTCCTG |
| | VH-VL-P x | | | CAAGGCTTCTGGGTACACCTTCACCAACTACTATATACACTGGGTGCGACAGGCCCCTGGACAAG |
| | F6A VH-VL-P | | | GTCTTGAGTGGATGGGTTGGATCAACCCTAACAGTGGTGCCACAAACTATGCACAGAAGTTCCAG |
| | | | | GGCAGAGTCACCATGACCAGGGACACGTCCACGAGCACAGTCTACATGGAGCTGAGCAGCCTGAG |
| | | | | ATCTGAGGACACGGCCGTGTATTACTGTGCGAAATCCTGGGTCTCCTGGTTTGCTTCCTGGGGTC |
| | | | | AAGGAACCTTGGTCACCGTCTCCTCAGGTGGTGGTGGTTCTGGCGGCGGCGGCTCCGGTGGTGGT |
| | | | | GGTTCTGAGCTCGTGATGACCCAGTCTCCAGACTCCCTGGCTGTGTCTCTGGGCGAGAGGGCCAC |
| | | | | CATCAACTGCAAGTCCAGCCAGAGTGTTTTAAACAGCTCCAACAATAGGAACTACTTAGCTTGGT |
| | | | | ACCAGCAGAAACCAGGACAGCCTCCTAAGCTGCTCATTTACTGGGCATCTACCCGGGAATCCGGG |
| | | | | GTCCCTGACCGATTCAGTGGCAGCGGGTCTGGGACAGATTTCACTCTCACCATCAGTGGCCTGCA |
| | | | | GGCTGAAGATGTGGCAGTTTATTACTGTCAGCAACATTATAGTACTCCATTCACTTTTGGCCCTG |
| | | | | GGACCAAAGTGGATATCAAATCCGGAGGTGGTGGATCCGAGGTGCAGCTGCTCGAGTCTGGAGGA |
| | | | | GGATTGGTGCAGCCTGGAGGGTCATTGAAACTCTCATGTGCAGCCTCTGGATTCACCTTCAATAT |
| | | | | CTACGCCATGAACTGGGTCCGCCAGGCTCCAGGAAAGGGTTTGGAATGGGTTGCTCGCATAAGAA |
| | | | | GTAAATATAATAATTATGCAACATATTATGCCGATTCAGTGAAAAGCAGGTTCACCATCTCCAGA |
| | | | | GATGATTCAAAAAACACTGCCTATCTACAAATGAACAACTTGAAAACTGAGGACACTGCCGTGTA |
| | | | | CTACTGTGTGAGACATGGGAACTTCGGTAATAGCTACGTATCCTTCTTCGCTTACTGGGGCCAAG |
| | | | | GGACTCTGGTCACCGTCTCCTCAGGTGGTGGTGGTTCTGGCGGCGGCGGCTCCGGTGGTGGTGGT |
| | | | | TCTGAGCTCGTTGTGACTCAGGAACCTTCACTCACCGTATCACCTGGTGGAACAGTCACACTCAC |
| | | | | TTGTGGCTCCTCGACTGGGGCTGTTACATCTGGCTACTACCCAAACTGGGTCCAACAAAAACCAG |
| | | | | GTCAGGCACCCCGTGGTCTAATAGGTGGGACTAAGTTCCTCGCCCCCGGTACTCCTGCCAGATTC |
| | | | | TCAGGCTCCCTGCTTGGAGGCAAGGCTGCCCTCACCCTCTCAGGGGTACAGCCAGAGGATGAGGC |
| | | | | AGAATATTACTGTGCTCTATGGTACAGCAACCGCTGGGTGTTCGGTGGAGGAACCAAACTGACTG |
| | | | | TCCTA |
| 197. | MCSP-G4 | artificial | aa | QVQLVQSGAEVKRPGASMKVSCKASGYTFTNYYIHWVRQAPGQGLEWMGWINPNSGATNYAQKFQ |
| | VH-VL-P x | | | GRVTMTRDTSTSTVYMELSSLRSEDTAVYYCAKSWVSWFASWGQGTLVTVSSGGGGSGGGGSGGG |
| | H2C VH-VL-P | | | GSELVMTQSPDSLAVSLGERATINCKSSQSVLNSSNNRNYLAWYQQKPGQPPKLLIYWASTRESG |
| | | | | VPDRFSGSGSGTDFTLTISGLQAEDVAVYYCQQHYSTPFTFGPGTKVDIKSGGGGSEVQLLESGG |
| | | | | GLVQPGGSLKLSCAASGFTFNKYAMNWVRQAPGKGLEWVARIRSKYNNYATYYADSVKDRFTISR |
| | | | | DDSKNTAYLQMNNLKTEDTAVYYCVRHGNFGNSYISYWAYWGQGTLVTVSSGGGGSGGGGSGGGG |
| | | | | SELVVTQEPSLTVSPGGTVTLTCGSSTGAVTSGYYPNWVQQKPGQAPRGLIGGTKFLAPGTPARF |
| | | | | SGSLLGGKAALTLSGVQPEDEAEYYCALWYSNRWVFGGGTKLTVL |
| 198. | MCSP-G4 | artificial | nt | CAGGTGCAGCTGGTCCAGTCTGGGGCTGAGGTGAAGAGGCCTGGGGCCTCAATGAAGGTCTCCTG |
| | VH-VL-P x | | | CAAGGCTTCTGGGTACACCTTCACCAACTACTATATACACTGGGTGCGACAGGCCCCTGGACAAG |
| | H2C VH-VL-P | | | GTCTTGAGTGGATGGGTTGGATCAACCCTAACAGTGGTGCCACAAACTATGCACAGAAGTTCCAG |
| | | | | GGCAGAGTCACCATGACCAGGGACACGTCCACGAGCACAGTCTACATGGAGCTGAGCAGCCTGAG |
| | | | | ATCTGAGGACACGGCCGTGTATTACTGTGCGAAATCCTGGGTCTCCTGGTTTGCTTCCTGGGGTC |
| | | | | AAGGAACCTTGGTCACCGTCTCCTCAGGTGGTGGTGGTTCTGGCGGCGGCGGCTCCGGTGGTGGT |
| | | | | GGTTCTGAGCTCGTGATGACCCAGTCTCCAGACTCCCTGGCTGTGTCTCTGGGCGAGAGGGCCAC |
| | | | | CATCAACTGCAAGTCCAGCCAGAGTGTTTTAAACAGCTCCAACAATAGGAACTACTTAGCTTGGT |
| | | | | ACCAGCAGAAACCAGGACAGCCTCCTAAGCTGCTCATTTACTGGGCATCTACCCGGGAATCCGGG |
| | | | | GTCCCTGACCGATTCAGTGGCAGCGGGTCTGGGACAGATTTCACTCTCACCATCAGTGGCCTGCA |
| | | | | GGCTGAAGATGTGGCAGTTTATTACTGTCAGCAACATTATAGTACTCCATTCACTTTTGGCCCTG |
| | | | | GGACCAAAGTGGATATCAAATCCGGAGGTGGTGGATCCGAGGTGCAGCTGCTCGAGTCTGGAGGA |
| | | | | GGATTGGTGCAGCCTGGAGGGTCATTGAAACTCTCATGTGCAGCCTCTGGATTCACCTTCAATAA |
| | | | | GTACGCCATGAACTGGGTCCGCCAGGCTCCAGGAAAGGGTTTGGAATGGGTTGCTCGCATAAGAA |
| | | | | GTAAATATAATAATTATGCAACATATTATGCCGATTCAGTGAAAGACAGGTTCACCATCTCCAGA |
| | | | | GATGATTCAAAAAACACTGCCTATCTACAAATGAACAACTTGAAAACTGAGGACACTGCCGTGTA |
| | | | | CTACTGTGTGAGACATGGGAACTTCGGTAATAGCTACATATCCTACTGGGCTTACTGGGGCCAAG |
| | | | | GGACTCTGGTCACCGTCTCCTCAGGTGGTGGTGGTTCTGGCGGCGGCGGCTCCGGTGGTGGTGGT |
| | | | | TCTGAGCTCGTTGTGACTCAGGAACCTTCACTCACCGTATCACCTGGTGGAACAGTCACACTCAC |
| | | | | TTGTGGCTCCTCGACTGGGGCTGTTACATCTGGCTACTACCCAAACTGGGTCCAACAAAAACCAG |
| | | | | GTCAGGCACCCCGTGGTCTAATAGGTGGGACTAAGTTCCTCGCCCCCGGTACTCCTGCCAGATTC |
| | | | | TCAGGCTCCCTGCTTGGAGGCAAGGCTGCCCTCACCCTCTCAGGGGTACAGCCAGAGGATGAGGC |
| | | | | AGAATATTACTGTGCTCTATGGTACAGCAACCGCTGGGTGTTCGGTGGAGGAACCAAACTGACTG |
| | | | | TCCTA |
| 199. | MCSP-G4 | artificial | aa | QVQLVQSGAEVKRPGASMKVSCKASGYTFTNYYIHWVRQAPGQGLEWMGWINPNSGATNYAQKFQ |
| | VH-VL-P x | | | GRVTMTRDTSTSTVYMELSSLRSEDTAVYYCAKSWVSWFASWGQGTLVTVSSGGGGSGGGGSGGG |
| | H1E VH-VL-P | | | GSELVMTQSPDSLAVSLGERATINCKSSQSVLNSSNNRNYLAWYQQKPGQPPKLLIYWASTRESG |
| | | | | VPDRFSGSGSGTDFTLTISGLQAEDVAVYYCQQHYSTPFTFGPGTKVDIKSGGGGSEVQLLESGG |
| | | | | GLEQPGGSLKLSCAASGFTFNSYAMNWVRQAPGKGLEWVARIRSKYNNYATYYADSVKGRFTISR |
| | | | | DDSKNTAYLQMNNLKTEDTAVYYCVRHGNFGNSYLSFWAYWGQGTLVTVSSGGGGSGGGGSGGGG |
| | | | | SELVVTQEPSLTVSPGGTVTLTCGSSTGAVTSGYYPNWVQQKPGQAPRGLIGGTKFLAPGTPARF |
| | | | | SGSLLGGKAALTLSGVQPEDEAEYYCALWYSNRWVFGGGTKLTVL |
| 200. | MCSP-G4 | artificial | nt | CAGGTGCAGCTGGTCCAGTCTGGGGCTGAGGTGAAGAGGCCTGGGGCCTCAATGAAGGTCTCCTG |
| | VH-VL-P x | | | CAAGGCTTCTGGGTACACCTTCACCAACTACTATATACACTGGGTGCGACAGGCCCCTGGACAAG |
| | H1E VH-VL-P | | | GTCTTGAGTGGATGGGTTGGATCAACCCTAACAGTGGTGCCACAAACTATGCACAGAAGTTCCAG |
| | | | | GGCAGAGTCACCATGACCAGGGACACGTCCACGAGCACAGTCTACATGGAGCTGAGCAGCCTGAG |
| | | | | ATCTGAGGACACGGCCGTGTATTACTGTGCGAAATCCTGGGTCTCCTGGTTTGCTTCCTGGGGTC |
| | | | | AAGGAACCTTGGTCACCGTCTCCTCAGGTGGTGGTGGTTCTGGCGGCGGCGGCTCCGGTGGTGGT |
| | | | | GGTTCTGAGCTCGTGATGACCCAGTCTCCAGACTCCCTGGCTGTGTCTCTGGGCGAGAGGGCCAC |
| | | | | CATCAACTGCAAGTCCAGCCAGAGTGTTTTAAACAGCTCCAACAATAGGAACTACTTAGCTTGGT |
| | | | | ACCAGCAGAAACCAGGACAGCCTCCTAAGCTGCTCATTTACTGGGCATCTACCCGGGAATCCGGG |
| | | | | GTCCCTGACCGATTCAGTGGCAGCGGGTCTGGGACAGATTTCACTCTCACCATCAGTGGCCTGCA |
| | | | | GGCTGAAGATGTGGCAGTTTATTACTGTCAGCAACATTATAGTACTCCATTCACTTTTGGCCCTG |
| | | | | GGACCAAAGTGGATATCAAATCCGGAGGTGGTGGATCCGAGGTGCAGCTGCTCGAGTCTGGAGGA |
| | | | | GGATTGGAGCAGCCTGGAGGGTCATTGAAACTCTCATGTGCAGCCTCTGGATTCACCTTCAATTC |
| | | | | GTACGCCATGAACTGGGTCCGCCAGGCTCCAGGAAAGGGTTTGGAATGGGTTGCTCGCATAAGAA |
| | | | | GTAAATATAATAATTATGCAACATATTATGCCGATTCAGTGAAAGGGAGGTTCACCATCTCCAGA |
| | | | | GATGATTCAAAAAACACTGCCTATCTACAAATGAACAACTTGAAAACTGAGGACACTGCCGTGTA |
| | | | | CTACTGTGTGAGACATGGGAACTTCGGTAATAGCTACCTATCCTTCTGGGCTTACTGGGGCCAAG |
| | | | | GGACTCTGGTCACCGTCTCCTCAGGTGGTGGTGGTTCTGGCGGCGGCGGCTCCGGTGGTGGTGGT |
| | | | | TCTGAGCTCGTTGTGACTCAGGAACCTTCACTCACCGTATCACCTGGTGGAACAGTCACACTCAC |
| | | | | TTGTGGCTCCTCGACTGGGGCTGTTACATCTGGCTACTACCCAAACTGGGTCCAACAAAAACCAG |
| | | | | GTCAGGCACCCCGTGGTCTAATAGGTGGGACTAAGTTCCTCGCCCCCGGTACTCCTGCCAGATTC |
| | | | | TCAGGCTCCCTGCTTGGAGGCAAGGCTGCCCTCACCCTCTCAGGGGTACAGCCAGAGGATGAGGC |
| | | | | AGAATATTACTGTGCTCTATGGTACAGCAACCGCTGGGTGTTCGGTGGAGGAACCAAACTGACTG |
| | | | | TCCTA |
| 201. | MCSP-G4 | artificial | aa | QVQLVQSGAEVKRPGASMKVSCKASGYTFTNYYIHWVRQAPGQGLEWMGWINPNSGATNYAQKFQ |
| | VH-VL-P x | | | GRVTMTRDTSTSTVYMELSSLRSEDTAVYYCAKSWVSWFASWGQGTLVTVSSGGGGSGGGGSGGG |
| | G4H VH-VL-P | | | GSELVMTQSPDSLAVSLGERATINCKSSQSVLNSSNNRNYLAWYQQKPGQPPKLLIYWASTRESG |
| | | | | VPDRFSGSGSGTDFTLTISGLQAEDVAVYYCQQHYSTPFTFGPGTKVDIKSGGGGSEVQLLESGG |
| | | | | GLVQPGGSLKLSCAASGFTFNRYAMNWVRQAPGKGLEWVARIRSKYNNYATYYADSVKGRFTISR |
| | | | | DDSKNTAYLQMNNLKTEDTAVYYCVRHGNFGNSYLSYFAYWGQGTLVTVSSGGGGSGGGGSGGGG |
| | | | | SELVVTQEPSLTVSPGGTVTLTCGSSTGAVTSGYYPNWVQQKPGQAPRGLIGGTKFLAPGTPARF |
| | | | | SGSLLGGKAALTLSGVQPEDEAEYYCALWYSNRWVFGGGTKLTVL |
| 202. | MCSP-G4 | artificial | nt | CAGGTGCAGCTGGTCCAGTCTGGGGCTGAGGTGAAGAGGCCTGGGGCCTCAATGAAGGTCTCCTG |
| | VH-VL-P x | | | CAAGGCTTCTGGGTACACCTTCACCAACTACTATATACACTGGGTGCGACAGGCCCCTGGACAAG |
| | G4H VH-VL-P | | | GTCTTGAGTGGATGGGTTGGATCAACCCTAACAGTGGTGCCACAAACTATGCACAGAAGTTCCAG |
| | | | | GGCAGAGTCACCATGACCAGGGACACGTCCACGAGCACAGTCTACATGGAGCTGAGCAGCCTGAG |
| | | | | ATCTGAGGACACGGCCGTGTATTACTGTGCGAAATCCTGGGTCTCCTGGTTTGCTTCCTGGGGTC |
| | | | | AAGGAACCTTGGTCACCGTCTCCTCAGGTGGTGGTGGTTCTGGCGGCGGCGGCTCCGGTGGTGGT |
| | | | | GGTTCTGAGCTCGTGATGACCCAGTCTCCAGACTCCCTGGCTGTGTCTCTGGGCGAGAGGGCCAC |
| | | | | CATCAACTGCAAGTCCAGCCAGAGTGTTTTAAACAGCTCCAACAATAGGAACTACTTAGCTTGGT |
| | | | | ACCAGCAGAAACCAGGACAGCCTCCTAAGCTGCTCATTTACTGGGCATCTACCCGGGAATCCGGG |
| | | | | GTCCCTGACCGATTCAGTGGCAGCGGGTCTGGGACAGATTTCACTCTCACCATCAGTGGCCTGCA |
| | | | | GGCTGAAGATGTGGCAGTTTATTACTGTCAGCAACATTATAGTACTCCATTCACTTTTGGCCCTG |
| | | | | GGACCAAAGTGGATATCAAATCCGGAGGTGGTGGATCCGAGGTGCAGCTGCTCGAGTCTGGAGGA |
| | | | | GGATTGGTGCAGCCTGGAGGGTCATTGAAACTCTCATGTGCAGCCTCTGGATTCACCTTCAATCG |
| | | | | CTACGCCATGAACTGGGTCCGCCAGGCTCCAGGAAAGGGTTTGGAATGGGTTGCTCGCATAAGAA |
| | | | | GTAAATATAATAATTATGCAACATATTATGCCGATTCAGTGAAAGGGAGGTTCACCATCTCCAGA |
| | | | | GATGATTCAAAAAACACTGCCTATCTACAAATGAACAACTTGAAAACTGAGGACACTGCCGTGTA |
| | | | | CTACTGTGTGAGACATGGGAACTTCGGTAATAGCTACTTATCCTACTTCGCTTACTGGGGCCAAG |
| | | | | GGACTCTGGTCACCGTCTCCTCAGGTGGTGGTGGTTCTGGCGGCGGCGGCTCCGGTGGTGGTGGT |
| | | | | TCTGAGCTCGTTGTGACTCAGGAACCTTCACTCACCGTATCACCTGGTGGAACAGTCACACTCAC |
| | | | | TTGTGGCTCCTCGACTGGGGCTGTTACATCTGGCTACTACCCAAACTGGGTCCAACAAAAACCAG |
| | | | | GTCAGGCACCCCGTGGTCTAATAGGTGGGACTAAGTTCCTCGCCCCCGGTACTCCTGCCAGATTC |
| | | | | TCAGGCTCCCTGCTTGGAGGCAAGGCTGCCCTCACCCTCTCAGGGGTACAGCCAGAGGATGAGGC |
| | | | | AGAATATTACTGTGCTCTATGGTACAGCAACCGCTGGGTGTTCGGTGGAGGAACCAAACTGACTG |
| | | | | TCCTA |
| 203. | MCSP-G4 | artificial | aa | QVQLVQSGAEVKRPGASMKVSCKASGYTFTNYYIHWVRQAPGQGLEWMGWINPNSGATNYAQKFQ |
| | VH-VL-P x | | | GRVTMTRDTSTSTVYMELSSLRSEDTAVYYCAKSWVSWFASWGQGTLVTVSSGGGGSGGGGSGGG |
| | A2J VH-VL-P | | | GSELVMTQSPDSLAVSLGERATINCKSSQSVLNSSNNRNYLAWYQQKPGQPPKLLIYWASTRESG |
| | | | | VPDRFSGSGSGTDFTLTISGLQAEDVAVYYCQQHYSTPFTFGPGTKVDIKSGGGGSEVQLLESGG |
| | | | | GLVQPGGSLKLSCAASGFTFNVYAMNWVRQAPGKGLEWVARIRSKYNNYATYYADSVKKRFTISR |
| | | | | DDSKNTAYLQMNNLKTEDTAVYYCVRHGNFGNSYLSWWAYWGQGTLVTVSSGGGGSGGGGSGGGG |
| | | | | SELVVTQEPSLTVSPGGTVTLTCRSSTGAVTSGYYPNWVQQKPGQAPRGLIGATDMRPSGTPARF |
| | | | | SGSLLGGKAALTLSGVQPEDEAEYYCALWYSNRWVFGGGTKLTVL |
| 204. | MCSP-G4 | artificial | nt | CAGGTGCAGCTGGTCCAGTCTGGGGCTGAGGTGAAGAGGCCTGGGGCCTCAATGAAGGTCTCCTG |
| | VH-VL-P x | | | CAAGGCTTCTGGGTACACCTTCACCAACTACTATATACACTGGGTGCGACAGGCCCCTGGACAAG |
| | A2J VH-VL-P | | | GTCTTGAGTGGATGGGTTGGATCAACCCTAACAGTGGTGCCACAAACTATGCACAGAAGTTCCAG |
| | | | | GGCAGAGTCACCATGACCAGGGACACGTCCACGAGCACAGTCTACATGGAGCTGAGCAGCCTGAG |
| | | | | ATCTGAGGACACGGCCGTGTATTACTGTGCGAAATCCTGGGTCTCCTGGTTTGCTTCCTGGGGTC |
| | | | | AAGGAACCTTGGTCACCGTCTCCTCAGGTGGTGGTGGTTCTGGCGGCGGCGGCTCCGGTGGTGGT |
| | | | | GGTTCTGAGCTCGTGATGACCCAGTCTCCAGACTCCCTGGCTGTGTCTCTGGGCGAGAGGGCCAC |
| | | | | CATCAACTGCAAGTCCAGCCAGAGTGTTTTAAACAGCTCCAACAATAGGAACTACTTAGCTTGGT |
| | | | | ACCAGCAGAAACCAGGACAGCCTCCTAAGCTGCTCATTTACTGGGCATCTACCCGGGAATCCGGG |
| | | | | GTCCCTGACCGATTCAGTGGCAGCGGGTCTGGGACAGATTTCACTCTCACCATCAGTGGCCTGCA |
| | | | | GGCTGAAGATGTGGCAGTTTATTACTGTCAGCAACATTATAGTACTCCATTCACTTTTGGCCCTG |
| | | | | GGACCAAAGTGGATATCAAATCCGGAGGTGGTGGATCCGAGGTGCAGCTGCTCGAGTCTGGAGGA |
| | | | | GGATTGGTGCAGCCTGGAGGGTCATTGAAACTCTCATGTGCAGCCTCTGGATTCACCTTCAATGT |
| | | | | CTACGCCATGAACTGGGTCCGCCAGGCTCCAGGAAAGGGTTTGGAATGGGTTGCTCGCATAAGAA |
| | | | | GTAAATATAATAATTATGCAACATATTATGCCGATTCAGTGAAAAAGAGGTTCACCATCTCCAGA |
| | | | | GATGATTCAAAAAACACTGCCTATCTACAAATGAACAACTTGAAAACTGAGGACACTGCCGTGTA |
| | | | | CTACTGTGTGAGACATGGGAACTTCGGTAATAGCTACTTATCCTGGTGGGCTTACTGGGGCCAAG |
| | | | | GGACTCTGGTCACCGTCTCCTCAGGTGGTGGTGGTTCTGGCGGCGGCGGCTCCGGTGGTGGTGGT |
| | | | | TCTGAGCTCGTTGTGACTCAGGAACCTTCACTCACCGTATCACCTGGTGGAACAGTCACACTCAC |
| | | | | TTGTCGCTCCTCGACTGGGGCTGTTACATCTGGCTACTACCCAAACTGGGTCCAACAAAAACCAG |
| | | | | GTCAGGCACCCCGTGGTCTAATAGGTGCCACTGACATGAGGCCCTCTGGTACTCCTGCCAGATTC |
| | | | | TCAGGCTCCCTGCTTGGAGGCAAGGCTGCCCTCACCCTCTCAGGGGTACAGCCAGAGGATGAGGC |
| | | | | AGAATATTACTGTGCTCTATGGTACAGCAACCGCTGGGTGTTCGGTGGAGGAACCAAACTGACTG |
| | | | | TCCTA |
| 205. | MCSP-G4 | artificial | aa | QVQLVQSGAEVKRPGASMKVSCKASGYTFTNYYIHWVRQAPGQGLEWMGWINPNSGATNYAQKFQ |
| | VH-VL-P x | | | GRVTMTRDTSTSTVYMELSSLRSEDTAVYYCAKSWVSWFASWGQGTLVTVSSGGGGSGGGGSGGG |
| | E1L VH-VL-P | | | GSELVMTQSPDSLAVSLGERATINCKSSQSVLNSSNNRNYLAWYQQKPGQPPKLLIYWASTRESG |
| | | | | VPDRFSGSGSGTDFTLTISGLQAEDVAVYYCQQHYSTPFTFGPGTKVDIKSGGGGSEVQLLESGG |
| | | | | GLVQPGGSLKLSCAASGFTFNKYAMNWVRQAPGKGLEWVARIRSKYNNYATYYADSVKSRFTISR |
| | | | | DDSKNTAYLQMNNLKTEDTAVYYCVRHGNFGNSYTSYYAYWGQGTLVTVSSGGGGSGGGGSGGGG |
| | | | | SELVVTQEPSLTVSPGGTVTLTCGSSTGAVTSGYYPNWVQQKPGQAPRGLIGGTKFLAPGTPARF |
| | | | | SGSLLGGKAALTLSGVQPEDEAEYYCALWYSNRWVFGGGTKLTVL |
| 206. | MCSP-G4 | artificial | nt | CAGGTGCAGCTGGTCCAGTCTGGGGCTGAGGTGAAGAGGCCTGGGGCCTCAATGAAGGTCTCCTG |
| | VH-VL-P x | | | CAAGGCTTCTGGGTACACCTTCACCAACTACTATATACACTGGGTGCGACAGGCCCCTGGACAAG |
| | E1L VH-VL-P | | | GTCTTGAGTGGATGGGTTGGATCAACCCTAACAGTGGTGCCACAAACTATGCACAGAAGTTCCAG |
| | | | | GGCAGAGTCACCATGACCAGGGACACGTCCACGAGCACAGTCTACATGGAGCTGAGCAGCCTGAG |
| | | | | ATCTGAGGACACGGCCGTGTATTACTGTGCGAAATCCTGGGTCTCCTGGTTTGCTTCCTGGGGTC |
| | | | | AAGGAACCTTGGTCACCGTCTCCTCAGGTGGTGGTGGTTCTGGCGGCGGCGGCTCCGGTGGTGGT |
| | | | | GGTTCTGAGCTCGTGATGACCCAGTCTCCAGACTCCCTGGCTGTGTCTCTGGGCGAGAGGGCCAC |
| | | | | CATCAACTGCAAGTCCAGCCAGAGTGTTTTAAACAGCTCCAACAATAGGAACTACTTAGCTTGGT |
| | | | | ACCAGCAGAAACCAGGACAGCCTCCTAAGCTGCTCATTTACTGGGCATCTACCCGGGAATCCGGG |
| | | | | GTCCCTGACCGATTCAGTGGCAGCGGGTCTGGGACAGATTTCACTCTCACCATCAGTGGCCTGCA |
| | | | | GGCTGAAGATGTGGCAGTTTATTACTGTCAGCAACATTATAGTACTCCATTCACTTTTGGCCCTG |
| | | | | GGACCAAAGTGGATATCAAATCCGGAGGTGGTGGATCCGAGGTGCAGCTGCTCGAGTCTGGAGGA |
| | | | | GGATTGGTGCAGCCTGGAGGGTCATTGAAACTCTCATGTGCAGCCTCTGGATTCACCTTCAATAA |
| | | | | GTACGCCATGAACTGGGTCCGCCAGGCTCCAGGAAAGGGTTTGGAATGGGTTGCTCGCATAAGAA |
| | | | | GTAAATATAATAATTATGCAACATATTATGCCGATTCAGTGAAATCGAGGTTCACCATCTCCAGA |
| | | | | GATGATTCAAAAAACACTGCCTATCTACAAATGAACAACTTGAAAACTGAGGACACTGCCGTGTA |
| | | | | CTACTGTGTGAGACATGGGAACTTCGGTAATAGCTACACATCCTACTACGCTTACTGGGGCCAAG |
| | | | | GGACTCTGGTCACCGTCTCCTCAGGTGGTGGTGGTTCTGGCGGCGGCGGCTCCGGTGGTGGTGGT |
| | | | | TCTGAGCTCGTTGTGACTCAGGAACCTTCACTCACCGTATCACCTGGTGGAACAGTCACACTCAC |
| | | | | TTGTGGCTCCTCGACTGGGGCTGTTACATCTGGCTACTACCCAAACTGGGTCCAACAAAAACCAG |
| | | | | GTCAGGCACCCCGTGGTCTAATAGGTGGGACTAAGTTCCTCGCCCCCGGTACTCCTGCCAGATTC |
| | | | | TCAGGCTCCCTGCTTGGAGGCAAGGCTGCCCTCACCCTCTCAGGGGTACAGCCAGAGGATGAGGC |
| | | | | AGAATATTACTGTGCTCTATGGTACAGCAACCGCTGGGTGTTCGGTGGAGGAACCAAACTGACTG |
| | | | | TCCTA |
| 207. | MCSP-G4 | artificial | aa | QVQLVQSGAEVKRPGASMKVSCKASGYTFTNYYIHWVRQAPGQGLEWMGWINPNSGATNYAQKFQ |
| | VH-VL-P x | | | GRVTMTRDTSTSTVYMELSSLRSEDTAVYYCAKSWVSWFASWGQGTLVTVSSGGGGSGGGGSGGG |
| | E2M VH-VL-P | | | GSELVMTQSPDSLAVSLGERATINCKSSQSVLNSSNNRNYLAWYQQKPGQPPKLLIYWASTRESG |
| | | | | VPDRFSGSGSGTDFTLTISGLQAEDVAVYYCQQHYSTPFTFGPGTKVDIKSGGGGSEVQLLESGG |
| | | | | GLVQPGGSLKLSCAASGFTFNGYAMNWVRQAPGKGLEWVARIRSKYNNYATYYADSVKERFTISR |
| | | | | DDSKNTAYLQMNNLKTEDTAVYYCVRHRNFGNSYLSWFAYWGQGTLVTVSSGGGGSGGGGSGGGG |
| | | | | SELVVTQEPSLTVSPGGTVTLTCRSSTGAVTSGYYPNWVQQKPGQAPRGLIGATDMRPSGTPARF |
| | | | | SGSLLGGKAALTLSGVQPEDEAEYYCALWYSNRWVFGGGTKLTVL |
| 208. | MCSP-G4 | artificial | nt | CAGGTGCAGCTGGTCCAGTCTGGGGCTGAGGTGAAGAGGCCTGGGGCCTCAATGAAGGTCTCCTG |
| | VH-VL-P x | | | CAAGGCTTCTGGGTACACCTTCACCAACTACTATATACACTGGGTGCGACAGGCCCCTGGACAAG |
| | E2M VH-VL-P | | | GTCTTGAGTGGATGGGTTGGATCAACCCTAACAGTGGTGCCACAAACTATGCACAGAAGTTCCAG |
| | | | | GGCAGAGTCACCATGACCAGGGACACGTCCACGAGCACAGTCTACATGGAGCTGAGCAGCCTGAG |
| | | | | ATCTGAGGACACGGCCGTGTATTACTGTGCGAAATCCTGGGTCTCCTGGTTTGCTTCCTGGGGTC |
| | | | | AAGGAACCTTGGTCACCGTCTCCTCAGGTGGTGGTGGTTCTGGCGGCGGCGGCTCCGGTGGTGGT |
| | | | | GGTTCTGAGCTCGTGATGACCCAGTCTCCAGACTCCCTGGCTGTGTCTCTGGGCGAGAGGGCCAC |
| | | | | CATCAACTGCAAGTCCAGCCAGAGTGTTTTAAACAGCTCCAACAATAGGAACTACTTAGCTTGGT |
| | | | | ACCAGCAGAAACCAGGACAGCCTCCTAAGCTGCTCATTTACTGGGCATCTACCCGGGAATCCGGG |
| | | | | GTCCCTGACCGATTCAGTGGCAGCGGGTCTGGGACAGATTTCACTCTCACCATCAGTGGCCTGCA |
| | | | | GGCTGAAGATGTGGCAGTTTATTACTGTCAGCAACATTATAGTACTCCATTCACTTTTGGCCCTG |
| | | | | GGACCAAAGTGGATATCAAATCCGGAGGTGGTGGATCCGAGGTGCAGCTGCTCGAGTCTGGAGGA |
| | | | | GGATTGGTGCAGCCTGGAGGGTCATTGAAACTCTCATGTGCAGCCTCTGGATTCACCTTCAATGG |
| | | | | CTACGCCATGAACTGGGTCCGCCAGGCTCCAGGAAAGGGTTTGGAATGGGTTGCTCGCATAAGAA |
| | | | | GTAAATATAATAATTATGCAACATATTATGCCGATTCAGTGAAAGAGAGGTTCACCATCTCCAGA |
| | | | | GATGATTCAAAAAACACTGCCTATCTACAAATGAACAACTTGAAAACTGAGGACACTGCCGTGTA |
| | | | | CTACTGTGTGAGACATAGGAACTTCGGTAATAGCTACTTATCCTGGTTCGCTTACTGGGGCCAAG |
| | | | | GGACTCTGGTCACCGTCTCCTCAGGTGGTGGTGGTTCTGGCGGCGGCGGCTCCGGTGGTGGTGGT |
| | | | | TCTGAGCTCGTTGTGACTCAGGAACCTTCACTCACCGTATCACCTGGTGGAACAGTCACACTCAC |
| | | | | TTGTCGCTCCTCGACTGGGGCTGTTACATCTGGCTACTACCCAAACTGGGTCCAACAAAAACCAG |
| | | | | GTCAGGCACCCCGTGGTCTAATAGGTGCCACTGACATGAGGCCCTCTGGTACTCCTGCCAGATTC |
| | | | | TCAGGCTCCCTGCTTGGAGGCAAGGCTGCCCTCACCCTCTCAGGGGTACAGCCAGAGGATGAGGC |
| | | | | AGAATATTACTGTGCTCTATGGTACAGCAACCGCTGGGTGTTCGGTGGAGGAACCAAACTGACTG |
| | | | | TCCTA |
| 209. | MCSP-G4 | artificial | aa | QVQLVQSGAEVKRPGASMKVSCKASGYTFTNYYIHWVRQAPGQGLEWMGWINPNSGATNYAQKFQ |
| | VH-VL-P x | | | GRVTMTRDTSTSTVYMELSSLRSEDTAVYYCAKSWVSWFASWGQGTLVTVSSGGGGSGGGGSGGG |
| | F7O VH-VL-P | | | GSELVMTQSPDSLAVSLGERATINCKSSQSVLNSSNNRNYLAWYQQKPGQPPKLLIYWASTRESG |
| | | | | VPDRFSGSGSGTDFTLTISGLQAEDVAVYYCQQHYSTPFTFGPGTKVDIKSGGGGSEVQLLESGG |
| | | | | GLVQPGGSLKLSCAASGFTFNVYAMNWVRQAPGKGLEWVARIRSKYNNYATYYADSVKKRFTISR |
| | | | | DDSKNTAYLQMNNLKTEDTAVYYCVRHGNFGNSYISWWAYWGQGTLVTVSSGGGGSGGGGSGGGG |
| | | | | SELVVTQEPSLTVSPGGTVTLTCGSSTGAVTSGYYPNWVQQKPGQAPRGLIGGTKFLAPGTPARF |
| | | | | SGSLLGGKAALTLSGVQPEDEAEYYCALWYSNRWVFGGGTKLTVL |
| 210. | MCSP-G4 | artificial | nt | CAGGTGCAGCTGGTCCAGTCTGGGGCTGAGGTGAAGAGGCCTGGGGCCTCAATGAAGGTCTCCTG |
| | VH-VL-P x | | | CAAGGCTTCTGGGTACACCTTCACCAACTACTATATACACTGGGTGCGACAGGCCCCTGGACAAG |
| | F7O VH-VL-P | | | GTCTTGAGTGGATGGGTTGGATCAACCCTAACAGTGGTGCCACAAACTATGCACAGAAGTTCCAG |
| | | | | GGCAGAGTCACCATGACCAGGGACACGTCCACGAGCACAGTCTACATGGAGCTGAGCAGCCTGAG |
| | | | | ATCTGAGGACACGGCCGTGTATTACTGTGCGAAATCCTGGGTCTCCTGGTTTGCTTCCTGGGGTC |
| | | | | AAGGAACCTTGGTCACCGTCTCCTCAGGTGGTGGTGGTTCTGGCGGCGGCGGCTCCGGTGGTGGT |
| | | | | GGTTCTGAGCTCGTGATGACCCAGTCTCCAGACTCCCTGGCTGTGTCTCTGGGCGAGAGGGCCAC |
| | | | | CATCAACTGCAAGTCCAGCCAGAGTGTTTTAAACAGCTCCAACAATAGGAACTACTTAGCTTGGT |
| | | | | ACCAGCAGAAACCAGGACAGCCTCCTAAGCTGCTCATTTACTGGGCATCTACCCGGGAATCCGGG |
| | | | | GTCCCTGACCGATTCAGTGGCAGCGGGTCTGGGACAGATTTCACTCTCACCATCAGTGGCCTGCA |
| | | | | GGCTGAAGATGTGGCAGTTTATTACTGTCAGCAACATTATAGTACTCCATTCACTTTTGGCCCTG |
| | | | | GGACCAAAGTGGATATCAAATCCGGAGGTGGTGGATCCGAGGTGCAGCTGCTCGAGTCTGGAGGA |
| | | | | GGATTGGTGCAGCCTGGAGGGTCATTGAAACTCTCATGTGCAGCCTCTGGATTCACCTTCAATGT |
| | | | | GTACGCCATGAACTGGGTCCGCCAGGCTCCAGGAAAGGGTTTGGAATGGGTTGCTCGCATAAGAA |
| | | | | GTAAATATAATAATTATGCAACATATTATGCCGATTCAGTGAAAAAGAGGTTCACCATCTCCAGA |
| | | | | GATGATTCAAAAAACACTGCCTATCTACAAATGAACAACTTGAAAACTGAGGACACTGCCGTGTA |
| | | | | CTACTGTGTGAGACATGGGAACTTCGGTAATAGCTACATATCCTGGTGGGCTTACTGGGGCCAAG |
| | | | | GGACTCTGGTCACCGTCTCCTCAGGTGGTGGTGGTTCTGGCGGCGGCGGCTCCGGTGGTGGTGGT |
| | | | | TCTGAGCTCGTTGTGACTCAGGAACCTTCACTCACCGTATCACCTGGTGGAACAGTCACACTCAC |
| | | | | TTGTGGCTCCTCGACTGGGGCTGTTACATCTGGCTACTACCCAAACTGGGTCCAACAAAAACCAG |
| | | | | GTCAGGCACCCCGTGGTCTAATAGGTGGGACTAAGTTCCTCGCCCCCGGTACTCCTGCCAGATTC |
| | | | | TCAGGCTCCCTGCTTGGAGGCAAGGCTGCCCTCACCCTCTCAGGGGTACAGCCAGAGGATGAGGC |
| | | | | AGAATATTACTGTGCTCTATGGTACAGCAACCGCTGGGTGTTCGGTGGAGGAACCAAACTGACTG |
| | | | | TCCTA |
| 211. | MCSP-G4 | artificial | aa | QVQLVQSGAEVKRPGASMKVSCKASGYTFTNYYIHWVRQAPGQGLEWMGWINPNSGATNYAQKFQ |
| | VH-VL-P x | | | GRVTMTRDTSTSTVYMELSSLRSEDTAVYYCAKSWVSWFASWGQGTLVTVSSGGGGSGGGGSGGG |
| | F12Q VH-VL | | | GSELVMTQSPDSLAVSLGERATINCKSSQSVLNSSNNRNYLAWYQQKPGQPPKLLIYWASTRESG |
| | | | | VPDRFSGSGSGTDFTLTISGLQAEDVAVYYCQQHYSTPFTFGPGTKVDIKSGGGGSEVQLVESGG |
| | | | | GLVQPGGSLKLSCAASGFTFNSYAMNWVRQAPGKGLEWVARIRSKYNNYATYYADSVKGRFTISR |
| | | | | DDSKNTAYLQMNNLKTEDTAVYYCVRHGNFGNSYVSWWAYWGQGTLVTVSSGGGGSGGGGSGGGG |
| | | | | SQTVVTQEPSLTVSPGGTVTLTCGSSTGAVTSGNYPNWVQQKPGQAPRGLIGGTKFLAPGTPARF |
| | | | | SGSLLGGKAALTLSGVQPEDEAEYYCVLWYSNRWVFGGGTKLTVL |
| 212. | MCSP-G4 | artificial | nt | CAGGTGCAGCTGGTCCAGTCTGGGGCTGAGGTGAAGAGGCCTGGGGCCTCAATGAAGGTCTCCTG |
| | VH-VL-P x | | | CAAGGCTTCTGGGTACACCTTCACCAACTACTATATACACTGGGTGCGACAGGCCCCTGGACAAG |
| | F12Q VH-VL | | | GTCTTGAGTGGATGGGTTGGATCAACCCTAACAGTGGTGCCACAAACTATGCACAGAAGTTCCAG |
| | | | | GGCAGAGTCACCATGACCAGGGACACGTCCACGAGCACAGTCTACATGGAGCTGAGCAGCCTGAG |
| | | | | ATCTGAGGACACGGCCGTGTATTACTGTGCGAAATCCTGGGTCTCCTGGTTTGCTTCCTGGGGTC |
| | | | | AAGGAACCTTGGTCACCGTCTCCTCAGGTGGTGGTGGTTCTGGCGGCGGCGGCTCCGGTGGTGGT |
| | | | | GGTTCTGAGCTCGTGATGACCCAGTCTCCAGACTCCCTGGCTGTGTCTCTGGGCGAGAGGGCCAC |
| | | | | CATCAACTGCAAGTCCAGCCAGAGTGTTTTAAACAGCTCCAACAATAGGAACTACTTAGCTTGGT |
| | | | | ACCAGCAGAAACCAGGACAGCCTCCTAAGCTGCTCATTTACTGGGCATCTACCCGGGAATCCGGG |
| | | | | GTCCCTGACCGATTCAGTGGCAGCGGGTCTGGGACAGATTTCACTCTCACCATCAGTGGCCTGCA |
| | | | | GGCTGAAGATGTGGCAGTTTATTACTGTCAGCAACATTATAGTACTCCATTCACTTTTGGCCCTG |
| | | | | GGACCAAAGTGGATATCAAATCCGGAGGTGGTGGATCCGAGGTGCAGCTGGTCGAGTCTGGAGGA |
| | | | | GGATTGGTGCAGCCTGGAGGGTCATTGAAACTCTCATGTGCAGCCTCTGGATTCACCTTCAATAG |
| | | | | CTACGCCATGAACTGGGTCCGCCAGGCTCCAGGAAAGGGTTTGGAATGGGTTGCTCGCATAAGAA |
| | | | | GTAAATATAATAATTATGCAACATATTATGCCGATTCAGTGAAAGGCAGGTTCACCATCTCCAGA |
| | | | | GATGATTCAAAAAACACTGCCTATCTACAAATGAACAACTTGAAAACTGAGGACACTGCCGTGTA |
| | | | | CTACTGTGTGAGACATGGGAACTTCGGTAATAGCTACGTTTCCTGGTGGGCTTACTGGGGCCAAG |
| | | | | GGACTCTGGTCACCGTCTCCTCAGGTGGTGGTGGTTCTGGCGGCGGCGGCTCCGGTGGTGGTGGT |
| | | | | TCTCAGACTGTTGTGACTCAGGAACCTTCACTCACCGTATCACCTGGTGGAACAGTCACACTCAC |
| | | | | TTGTGGCTCCTCGACTGGGGCTGTTACATCTGGCAACTACCCAAACTGGGTCCAACAAAAACCAG |
| | | | | GTCAGGCACCCCGTGGTCTAATAGGTGGGACTAAGTTCCTCGCCCCCGGTACTCCTGCCAGATTC |
| | | | | TCAGGCTCCCTGCTTGGAGGCAAGGCTGCCCTCACCCTCTCAGGGGTACAGCCAGAGGATGAGGC |
| | | | | AGAATATTACTGTGTTCTATGGTACAGCAACCGCTGGGTGTTCGGTGGAGGAACCAAACTGACTG |
| | | | | TCCTA |
| 213. | MCSP-G4 | artificial | aa | QVQLVQSGAEVKRPGASMKVSCKASGYTFTNYYIHWVRQAPGQGLEWMGWINPNSGATNYAQKFQ |
| | VH-VL-P x | | | GRVTMTRDTSTSTVYMELSSLRSEDTAVYYCAKSWVSWFASWGQGTLVTVSSGGGGSGGGGSGGG |
| | I2C VH-VL | | | GSELVMTQSPDSLAVSLGERATINCKSSQSVLNSSNNRNYLAWYQQKPGQPPKLLIYWASTRESG |
| | | | | VPDRFSGSGSGTDFTLTISGLQAEDVAVYYCQQHYSTPFTFGPGTKVDIKSGGGGSEVQLVESGG |
| | | | | GLVQPGGSLKLSCAASGFTFNKYAMNWVRQAPGKGLEWVARIRSKYNNYATYYADSVKDRFTISR |
| | | | | DDSKNTAYLQMNNLKTEDTAVYYCVRHGNFGNSYISYWAYWGQGTLVTVSSGGGGSGGGGSGGGG |
| | | | | SQTVVTQEPSLTVSPGGTVTLTCGSSTGAVTSGNYPNWVQQKPGQAPRGLIGGTKFLAPGTPARF |
| | | | | SGSLLGGKAALTLSGVQPEDEAEYYCVLWYSNRWVFGGGTKLTVL |
| 214. | MCSP-G4 | artificial | nt | CAGGTGCAGCTGGTCCAGTCTGGGGCTGAGGTGAAGAGGCCTGGGGCCTCAATGAAGGTCTCCTG |
| | VH-VL-P x | | | CAAGGCTTCTGGGTACACCTTCACCAACTACTATATACACTGGGTGCGACAGGCCCCTGGACAAG |
| | I2C VH-VL | | | GTCTTGAGTGGATGGGTTGGATCAACCCTAACAGTGGTGCCACAAACTATGCACAGAAGTTCCAG |
| | | | | GGCAGAGTCACCATGACCAGGGACACGTCCACGAGCACAGTCTACATGGAGCTGAGCAGCCTGAG |
| | | | | ATCTGAGGACACGGCCGTGTATTACTGTGCGAAATCCTGGGTCTCCTGGTTTGCTTCCTGGGGTC |
| | | | | AAGGAACCTTGGTCACCGTCTCCTCAGGTGGTGGTGGTTCTGGCGGCGGCGGCTCCGGTGGTGGT |
| | | | | GGTTCTGAGCTCGTGATGACCCAGTCTCCAGACTCCCTGGCTGTGTCTCTGGGCGAGAGGGCCAC |
| | | | | CATCAACTGCAAGTCCAGCCAGAGTGTTTTAAACAGCTCCAACAATAGGAACTACTTAGCTTGGT |
| | | | | ACCAGCAGAAACCAGGACAGCCTCCTAAGCTGCTCATTTACTGGGCATCTACCCGGGAATCCGGG |
| | | | | GTCCCTGACCGATTCAGTGGCAGCGGGTCTGGGACAGATTTCACTCTCACCATCAGTGGCCTGCA |
| | | | | GGCTGAAGATGTGGCAGTTTATTACTGTCAGCAACATTATAGTACTCCATTCACTTTTGGCCCTG |
| | | | | GGACCAAAGTGGATATCAAATCCGGAGGTGGTGGATCCGAGGTGCAGCTGGTCGAGTCTGGAGGA |
| | | | | GGATTGGTGCAGCCTGGAGGGTCATTGAAACTCTCATGTGCAGCCTCTGGATTCACCTTCAATAA |
| | | | | GTACGCCATGAACTGGGTCCGCCAGGCTCCAGGAAAGGGTTTGGAATGGGTTGCTCGCATAAGAA |
| | | | | GTAAATATAATAATTATGCAACATATTATGCCGATTCAGTGAAAGACAGGTTCACCATCTCCAGA |
| | | | | GATGATTCAAAAAACACTGCCTATCTACAAATGAACAACTTGAAAACTGAGGACACTGCCGTGTA |
| | | | | CTACTGTGTGAGACATGGGAACTTCGGTAATAGCTACATATCCTACTGGGCTTACTGGGGCCAAG |
| | | | | GGACTCTGGTCACCGTCTCCTCAGGTGGTGGTGGTTCTGGCGGCGGCGGCTCCGGTGGTGGTGGT |
| | | | | TCTCAGACTGTTGTGACTCAGGAACCTTCACTCACCGTATCACCTGGTGGAACAGTCACACTCAC |
| | | | | TTGTGGCTCCTCGACTGGGGCTGTTACATCTGGCAACTACCCAAACTGGGTCCAACAAAAACCAG |
| | | | | GTCAGGCACCCCGTGGTCTAATAGGTGGGACTAAGTTCCTCGCCCCCGGTACTCCTGCCAGATTC |
| | | | | TCAGGCTCCCTGCTTGGAGGCAAGGCTGCCCTCACCCTCTCAGGGGTACAGCCAGAGGATGAGGC |
| | | | | AGAATATTACTGTGTTCTATGGTACAGCAACCGCTGGGTGTTCGGTGGAGGAACCAAACTGACTG |
| | | | | TCCTA |
| 215. | MCSP-D2 | artificial | aa | QVQLVQSGAEVKKPGASVKVSCKASGYTFTGYYMHWVRQAPGQGLEWMGWINPNSGGTSYAQKFQ |
| | VH-VL x | | | GRVTMTRDTSTSTVYMELSNLRSDDTAVYYCAKSWVSWFASWGQGTLVTVSSGGGGSGGGGSGGG |
| | H2C VH-VL | | | GSDIVMTQSPDSLAVSLGERATINCKSSQSVLNSSNNRNYLAWYQQKPGQPPKLLIYWASTRESG |
| | | | | VPDRFSGSGSGTDFTLTISGLQAEDVAVYYCQQHYSTPFTFGPGTKVDIKSGGGGSEVQLVESGG |
| | | | | GLVQPGGSLKLSCAASGFTFNKYAMNWVRQAPGKGLEWVARIRSKYNNYATYYADSVKDRFTISR |
| | | | | DDSKNTAYLQMNNLKTEDTAVYYCVRHGNFGNSYISYWAYWGQGTLVTVSSGGGGSGGGGSGGGG |
| | | | | SQTVVTQEPSLTVSPGGTVTLTCGSSTGAVTSGYYPNWVQQKPGQAPRGLIGGTKFLAPGTPARF |
| | | | | SGSLLGGKAALTLSGVQPEDEAEYYCALWYSNRWVFGGGTKLTVL |
| 216. | MCSP-D2 | artificial | nt | CAGGTGCAGCTGGTCCAGTCTGGGGCTGAGGTGAAGAAGCCTGGGGCCTCAGTGAAGGTCTCCTG |
| | VH-VL x | | | CAAGGCTTCTGGATACACCTTCACCGGCTACTATATGCACTGGGTGCGACAGGCCCCTGGACAAG |
| | H2C VH-VL | | | GGCTTGAGTGGATGGGATGGATCAACCCTAACAGTGGTGGCACAAGCTACGCACAGAAGTTCCAG |
| | | | | GGCAGAGTCACCATGACTAGGGACACGTCCACGAGCACAGTCTACATGGAGCTGAGCAACCTGAG |
| | | | | ATCTGACGACACGGCCGTGTATTACTGTGCGAAATCCTGGGTCTCCTGGTTTGCTTCCTGGGGTC |
| | | | | AAGGAACCTTGGTCACCGTCTCCTCAGGTGGTGGTGGTTCTGGCGGCGGCGGCTCCGGTGGTGGT |
| | | | | GGTTCTGATATCGTGATGACCCAGTCTCCAGACTCCCTGGCTGTGTCTCTGGGCGAGAGGGCCAC |
| | | | | CATCAACTGCAAGTCCAGCCAGAGTGTTTTAAACAGCTCCAACAATAGGAACTACTTAGCTTGGT |
| | | | | ACCAGCAGAAACCAGGACAGCCTCCTAAGCTGCTCATTTACTGGGCATCTACCCGGGAATCCGGG |
| | | | | GTCCCTGACCGATTCAGTGGCAGCGGGTCTGGGACAGATTTCACTCTCACCATCAGTGGCCTGCA |
| | | | | GGCTGAAGATGTGGCAGTTTATTACTGTCAGCAACATTATAGTACTCCATTCACTTTTGGCCCTG |
| | | | | GGACCAAAGTGGATATCAAATCCGGAGGTGGTGGATCCGAGGTGCAGCTGGTCGAGTCTGGAGGA |
| | | | | GGATTGGTGCAGCCTGGAGGGTCATTGAAACTCTCATGTGCAGCCTCTGGATTCACCTTCAATAA |
| | | | | GTACGCCATGAACTGGGTCCGCCAGGCTCCAGGAAAGGGTTTGGAATGGGTTGCTCGCATAAGAA |
| | | | | GTAAATATAATAATTATGCAACATATTATGCCGATTCAGTGAAAGACAGGTTCACCATCTCCAGA |
| | | | | GATGATTCAAAAAACACTGCCTATCTACAAATGAACAACTTGAAAACTGAGGACACTGCCGTGTA |
| | | | | CTACTGTGTGAGACATGGGAACTTCGGTAATAGCTACATATCCTACTGGGCTTACTGGGGCCAAG |
| | | | | GGACTCTGGTCACCGTCTCCTCAGGTGGTGGTGGTTCTGGCGGCGGCGGCTCCGGTGGTGGTGGT |
| | | | | TCTCAGACTGTTGTGACTCAGGAACCTTCACTCACCGTATCACCTGGTGGAACAGTCACACTCAC |
| | | | | TTGTGGCTCCTCGACTGGGGCTGTTACATCTGGCTACTACCCAAACTGGGTCCAACAAAAACCAG |
| | | | | GTCAGGCACCCCGTGGTCTAATAGGTGGGACTAAGTTCCTCGCCCCCGGTACTCCTGCCAGATTC |
| | | | | TCAGGCTCCCTGCTTGGAGGCAAGGCTGCCCTCACCCTCTCAGGGGTACAGCCAGAGGATGAGGC |
| | | | | AGAATATTACTGTGCTCTATGGTACAGCAACCGCTGGGTGTTCGGTGGAGGAACCAAACTGACTG |
| | | | | TCCTA |
| 217. | MCSP-D2 | artificial | aa | QVQLVQSGAEVKKPGASVKVSCKASGYTFTGYYMHWVRQAPGQGLEWMGWINPNSGGTSYAQKFQ |
| | VH-VL x | | | GRVTMTRDTSTSTVYMELSNLRSDDTAVYYCAKSWVSWFASWGQGTLVTVSSGGGGSGGGGSGGG |
| | F12Q VH-VL | | | GSDIVMTQSPDSLAVSLGERATINCKSSQSVLNSSNNRNYLAWYQQKPGQPPKLLIYWASTRESG |
| | | | | VPDRFSGSGSGTDFTLTISGLQAEDVAVYYCQQHYSTPFTFGPGTKVDIKSGGGGSEVQLVESGG |
| | | | | GLVQPGGSLKLSCAASGFTFNSYAMNWVRQAPGKGLEWVARIRSKYNNYATYYADSVKGRFTISR |
| | | | | DDSKNTAYLQMNNLKTEDTAVYYCVRHGNFGNSYVSWWAYWGQGTLVTVSSGGGGSGGGGSGGGG |
| | | | | SQTVVTQEPSLTVSPGGTVTLTCGSSTGAVTSGNYPNWVQQKPGQAPRGLIGGTKFLAPGTPARF |
| | | | | SGSLLGGKAALTLSGVQPEDEAEYYCVLWYSNRWVFGGGTKLTVL |
| 218. | MCSP-D2 | artificial | nt | CAGGTGCAGCTGGTCCAGTCTGGGGCTGAGGTGAAGAAGCCTGGGGCCTCAGTGAAGGTCTCCTG |
| | VH-VL x | | | CAAGGCTTCTGGATACACCTTCACCGGCTACTATATGCACTGGGTGCGACAGGCCCCTGGACAAG |
| | F12Q VH-VL | | | GGCTTGAGTGGATGGGATGGATCAACCCTAACAGTGGTGGCACAAGCTACGCACAGAAGTTCCAG |
| | | | | GGCAGAGTCACCATGACTAGGGACACGTCCACGAGCACAGTCTACATGGAGCTGAGCAACCTGAG |
| | | | | ATCTGACGACACGGCCGTGTATTACTGTGCGAAATCCTGGGTCTCCTGGTTTGCTTCCTGGGGTC |
| | | | | AAGGAACCTTGGTCACCGTCTCCTCAGGTGGTGGTGGTTCTGGCGGCGGCGGCTCCGGTGGTGGT |
| | | | | GGTTCTGATATCGTGATGACCCAGTCTCCAGACTCCCTGGCTGTGTCTCTGGGCGAGAGGGCCAC |
| | | | | CATCAACTGCAAGTCCAGCCAGAGTGTTTTAAACAGCTCCAACAATAGGAACTACTTAGCTTGGT |
| | | | | ACCAGCAGAAACCAGGACAGCCTCCTAAGCTGCTCATTTACTGGGCATCTACCCGGGAATCCGGG |
| | | | | GTCCCTGACCGATTCAGTGGCAGCGGGTCTGGGACAGATTTCACTCTCACCATCAGTGGCCTGCA |
| | | | | GGCTGAAGATGTGGCAGTTTATTACTGTCAGCAACATTATAGTACTCCATTCACTTTTGGCCCTG |
| | | | | GGACCAAAGTGGATATCAAATCCGGAGGTGGTGGATCCGAGGTGCAGCTGGTCGAGTCTGGAGGA |
| | | | | GGATTGGTGCAGCCTGGAGGGTCATTGAAACTCTCATGTGCAGCCTCTGGATTCACCTTCAATAG |
| | | | | CTACGCCATGAACTGGGTCCGCCAGGCTCCAGGAAAGGGTTTGGAATGGGTTGCTCGCATAAGAA |
| | | | | GTAAATATAATAATTATGCAACATATTATGCCGATTCAGTGAAAGGCAGGTTCACCATCTCCAGA |
| | | | | GATGATTCAAAAAACACTGCCTATCTACAAATGAACAACTTGAAAACTGAGGACACTGCCGTGTA |
| | | | | CTACTGTGTGAGACATGGGAACTTCGGTAATAGCTACGTTTCCTGGTGGGCTTACTGGGGCCAAG |
| | | | | GGACTCTGGTCACCGTCTCCTCAGGTGGTGGTGGTTCTGGCGGCGGCGGCTCCGGTGGTGGTGGT |
| | | | | TCTCAGACTGTTGTGACTCAGGAACCTTCACTCACCGTATCACCTGGTGGAACAGTCACACTCAC |
| | | | | TTGTGGCTCCTCGACTGGGGCTGTTACATCTGGCAACTACCCAAACTGGGTCCAACAAAAACCAG |
| | | | | GTCAGGCACCCCGTGGTCTAATAGGTGGGACTAAGTTCCTCGCCCCCGGTACTCCTGCCAGATTC |
| | | | | TCAGGCTCCCTGCTTGGAGGCAAGGCTGCCCTCACCCTCTCAGGGGTACAGCCAGAGGATGAGGC |
| | | | | AGAATATTACTGTGTTCTATGGTACAGCAACCGCTGGGTGTTCGGTGGAGGAACCAAACTGACTG |
| | | | | TCCTA |
| 219. | MCSP-D2 | artificial | aa | QVQLVQSGAEVKKPGASVKVSCKASGYTFTGYYMHWVRQAPGQGLEWMGWINPNSGGTSYAQKFQ |
| | VH-VL x | | | GRVTMTRDTSTSTVYMELSNLRSDDTAVYYCAKSWVSWFASWGQGTLVTVSSGGGGSGGGGSGGG |
| | I2C VH-VL | | | GSDIVMTQSPDSLAVSLGERATINCKSSQSVLNSSNNRNYLAWYQQKPGQPPKLLIYWASTRESG |
| | | | | VPDRFSGSGSGTDFTLTISGLQAEDVAVYYCQQHYSTPFTFGPGTKVDIKSGGGGSEVQLVESGG |
| | | | | GLVQPGGSLKLSCAASGFTFNKYAMNWVRQAPGKGLEWVARIRSKYNNYATYYADSVKDRFTISR |
| | | | | DDSKNTAYLQMNNLKTEDTAVYYCVRHGNFGNSYISYWAYWGQGTLVTVSSGGGGSGGGGSGGGG |
| | | | | SQTVVTQEPSLTVSPGGTVTLTCGSSTGAVTSGNYPNWVQQKPGQAPRGLIGGTKFLAPGTPARF |
| | | | | SGSLLGGKAALTLSGVQPEDEAEYYCVLWYSNRWVFGGGTKLTVL |
| 220. | MCSP-D2 | artificial | nt | CAGGTGCAGCTGGTCCAGTCTGGGGCTGAGGTGAAGAAGCCTGGGGCCTCAGTGAAGGTCTCCTG |
| | VH-VL x | | | CAAGGCTTCTGGATACACCTTCACCGGCTACTATATGCACTGGGTGCGACAGGCCCCTGGACAAG |
| | I2C VH-VL | | | GGCTTGAGTGGATGGGATGGATCAACCCTAACAGTGGTGGCACAAGCTACGCACAGAAGTTCCAG |
| | | | | GGCAGAGTCACCATGACTAGGGACACGTCCACGAGCACAGTCTACATGGAGCTGAGCAACCTGAG |
| | | | | ATCTGACGACACGGCCGTGTATTACTGTGCGAAATCCTGGGTCTCCTGGTTTGCTTCCTGGGGTC |
| | | | | AAGGAACCTTGGTCACCGTCTCCTCAGGTGGTGGTGGTTCTGGCGGCGGCGGCTCCGGTGGTGGT |
| | | | | GGTTCTGATATCGTGATGACCCAGTCTCCAGACTCCCTGGCTGTGTCTCTGGGCGAGAGGGCCAC |
| | | | | CATCAACTGCAAGTCCAGCCAGAGTGTTTTAAACAGCTCCAACAATAGGAACTACTTAGCTTGGT |
| | | | | ACCAGCAGAAACCAGGACAGCCTCCTAAGCTGCTCATTTACTGGGCATCTACCCGGGAATCCGGG |
| | | | | GTCCCTGACCGATTCAGTGGCAGCGGGTCTGGGACAGATTTCACTCTCACCATCAGTGGCCTGCA |
| | | | | GGCTGAAGATGTGGCAGTTTATTACTGTCAGCAACATTATAGTACTCCATTCACTTTTGGCCCTG |
| | | | | GGACCAAAGTGGATATCAAATCCGGAGGTGGTGGATCCGAGGTGCAGCTGGTCGAGTCTGGAGGA |
| | | | | GGATTGGTGCAGCCTGGAGGGTCATTGAAACTCTCATGTGCAGCCTCTGGATTCACCTTCAATAA |
| | | | | GTACGCCATGAACTGGGTCCGCCAGGCTCCAGGAAAGGGTTTGGAATGGGTTGCTCGCATAAGAA |
| | | | | GTAAATATAATAATTATGCAACATATTATGCCGATTCAGTGAAAGACAGGTTCACCATCTCCAGA |
| | | | | GATGATTCAAAAAACACTGCCTATCTACAAATGAACAACTTGAAAACTGAGGACACTGCCGTGTA |
| | | | | CTACTGTGTGAGACATGGGAACTTCGGTAATAGCTACATATCCTACTGGGCTTACTGGGGCCAAG |
| | | | | GGACTCTGGTCACCGTCTCCTCAGGTGGTGGTGGTTCTGGCGGCGGCGGCTCCGGTGGTGGTGGT |
| | | | | TCTCAGACTGTTGTGACTCAGGAACCTTCACTCACCGTATCACCTGGTGGAACAGTCACACTCAC |
| | | | | TTGTGGCTCCTCGACTGGGGCTGTTACATCTGGCAACTACCCAAACTGGGTCCAACAAAAACCAG |
| | | | | GTCAGGCACCCCGTGGTCTAATAGGTGGGACTAAGTTCCTCGCCCCCGGTACTCCTGCCAGATTC |
| | | | | TCAGGCTCCCTGCTTGGAGGCAAGGCTGCCCTCACCCTCTCAGGGGTACAGCCAGAGGATGAGGC |
| | | | | AGAATATTACTGTGTTCTATGGTACAGCAACCGCTGGGTGTTCGGTGGAGGAACCAAACTGACTG |
| | | | | TCCTA |
| 221. | MCSP-D2 | artificial | aa | QVQLVQSGAEVKKPGASVKVSCKASGYTFTGYYMHWVRQAPGQGLEWMGWINPNSGGTSYAQKFQ |
| | VH-VL-P x | | | GRVTMTRDTSTSTVYMELSNLRSDDTAVYYCAKSWVSWFASWGQGTLVTVSSGGGGSGGGGSGGG |
| | H2C VH-VL-P | | | GSELVMTQSPDSLAVSLGERATINCKSSQSVLNSSNNRNYLAWYQQKPGQPPKLLIYWASTRESG |
| | | | | VPDRFSGSGSGTDFTLTISGLQAEDVAVYYCQQHYSTPFTFGPGTKVDIKSGGGGSEVQLLESGG |
| | | | | GLVQPGGSLKLSCAASGFTFNKYAMNWVRQAPGKGLEWVARIRSKYNNYATYYADSVKDRFTISR |
| | | | | DDSKNTAYLQMNNLKTEDTAVYYCVRHGNFGNSYISYWAYWGQGTLVTVSSGGGGSGGGGSGGGG |
| | | | | SELVVTQEPSLTVSPGGTVTLTCGSSTGAVTSGYYPNWVQQKPGQAPRGLIGGTKFLAPGTPARF |
| | | | | SGSLLGGKAALTLSGVQPEDEAEYYCALWYSNRWVFGGGTKLTVL |
| 222. | MCSP-D2 | artificial | nt | CAGGTGCAGCTGGTCCAGTCTGGGGCTGAGGTGAAGAAGCCTGGGGCCTCAGTGAAGGTCTCCTG |
| | VH-VL-P x | | | CAAGGCTTCTGGATACACCTTCACCGGCTACTATATGCACTGGGTGCGACAGGCCCCTGGACAAG |
| | H2C VH-VL-P | | | GGCTTGAGTGGATGGGATGGATCAACCCTAACAGTGGTGGCACAAGCTACGCACAGAAGTTCCAG |
| | | | | GGCAGAGTCACCATGACTAGGGACACGTCCACGAGCACAGTCTACATGGAGCTGAGCAACCTGAG |
| | | | | ATCTGACGACACGGCCGTGTATTACTGTGCGAAATCCTGGGTCTCCTGGTTTGCTTCCTGGGGTC |
| | | | | AAGGAACCTTGGTCACCGTCTCCTCAGGTGGTGGTGGTTCTGGCGGCGGCGGCTCCGGTGGTGGT |
| | | | | GGTTCTGAGCTCGTGATGACCCAGTCTCCAGACTCCCTGGCTGTGTCTCTGGGCGAGAGGGCCAC |
| | | | | CATCAACTGCAAGTCCAGCCAGAGTGTTTTAAACAGCTCCAACAATAGGAACTACTTAGCTTGGT |
| | | | | ACCAGCAGAAACCAGGACAGCCTCCTAAGCTGCTCATTTACTGGGCATCTACCCGGGAATCCGGG |
| | | | | GTCCCTGACCGATTCAGTGGCAGCGGGTCTGGGACAGATTTCACTCTCACCATCAGTGGCCTGCA |
| | | | | GGCTGAAGATGTGGCAGTTTATTACTGTCAGCAACATTATAGTACTCCATTCACTTTTGGCCCTG |
| | | | | GGACCAAAGTGGATATCAAATCCGGAGGTGGTGGATCCGAGGTGCAGCTGCTCGAGTCTGGAGGA |
| | | | | GGATTGGTGCAGCCTGGAGGGTCATTGAAACTCTCATGTGCAGCCTCTGGATTCACCTTCAATAA |
| | | | | GTACGCCATGAACTGGGTCCGCCAGGCTCCAGGAAAGGGTTTGGAATGGGTTGCTCGCATAAGAA |
| | | | | GTAAATATAATAATTATGCAACATATTATGCCGATTCAGTGAAAGACAGGTTCACCATCTCCAGA |
| | | | | GATGATTCAAAAAACACTGCCTATCTACAAATGAACAACTTGAAAACTGAGGACACTGCCGTGTA |
| | | | | CTACTGTGTGAGACATGGGAACTTCGGTAATAGCTACATATCCTACTGGGCTTACTGGGGCCAAG |
| | | | | GGACTCTGGTCACCGTCTCCTCAGGTGGTGGTGGTTCTGGCGGCGGCGGCTCCGGTGGTGGTGGT |
| | | | | TCTGAGCTCGTTGTGACTCAGGAACCTTCACTCACCGTATCACCTGGTGGAACAGTCACACTCAC |
| | | | | TTGTGGCTCCTCGACTGGGGCTGTTACATCTGGCTACTACCCAAACTGGGTCCAACAAAAACCAG |
| | | | | GTCAGGCACCCCGTGGTCTAATAGGTGGGACTAAGTTCCTCGCCCCCGGTACTCCTGCCAGATTC |
| | | | | TCAGGCTCCCTGCTTGGAGGCAAGGCTGCCCTCACCCTCTCAGGGGTACAGCCAGAGGATGAGGC |
| | | | | AGAATATTACTGTGCTCTATGGTACAGCAACCGCTGGGTGTTCGGTGGAGGAACCAAACTGACTG |
| | | | | TCCTA |
| 223. | MCSP-F9 | artificial | aa | QVQLQESGPGLVKPSETLSLTCVVSGGSISSSNWWSWVRQPPGKGLEWLGTIYYNGNTYYNPSLK |
| | VH-VL x | | | SRVTISVDTSKNQFSLRLSSVTAADTAVYYCAKSWVSWFASWGQGTLVTVSSGGGGSGGGGSGGG |
| | H2C VH-VL | | | GSDIVMTQSPDSLAVSLGERATINCKSSQSVLSSSNNKNYLNWYQQKPGQPPKLLIYWASTRESG |
| | | | | VPDRFSGSGSGTDFTLTISSLQAEDVAVYYCQQHYSVPFTFGPGTKVDIKGGGGSEVQLVESGGG |
| | | | | LVQPGGSLKLSCAASGFTFNKYAMNWVRQAPGKGLEWVARIRSKYNNYATYYADSVKDRFTISRD |
| | | | | DSKNTAYLQMNNLKTEDTAVYYCVRHGNFGNSYISYWAYWGQGTLVTVSSGGGGSGGGGSGGGGS |
| | | | | QTVVTQEPSLTVSPGGTVTLTCGSSTGAVTSGYYPNWVQQKPGQAPRGLIGGTKFLAPGTPARFS |
| | | | | GSLLGGKAALTLSGVQPEDEAEYYCALWYSNRWVFGGGTKLTVL |
| 224. | MCSP-F9 | artificial | nt | CAGGTGCAGCTGCAAGAGTCTGGCCCAGGACTGGTGAAGCCTTCGGAGACCCTGTCCCTCACCTG |
| | VH-VL x | | | CGTTGTCTCTGGTGGCTCCATCAGCAGTAGTAACTGGTGGAGCTGGGTCCGCCAGCCCCCAGGGA |
| | H2C VH-VL | | | AGGGACTGGAGTGGCTTGGGACTATCTATTATAATGGGAATACCTACTACAACCCGTCCCTCAAG |
| | | | | AGTCGAGTCACCATCTCCGTAGACACGTCCAAGAACCAGTTCTCCCTGAGGCTGAGCTCTGTGAC |
| | | | | CGCCGCAGACACGGCCGTGTATTACTGTGCGAAATCCTGGGTCTCCTGGTTTGCTTCCTGGGGTC |
| | | | | AAGGAACCTTGGTCACCGTCTCCTCAGGTGGTGGTGGTTCTGGCGGCGGCGGCTCCGGTGGTGGT |
| | | | | GGTTCTGATATCGTGATGACACAGTCTCCAGACTCCCTGGCTGTGTCTCTGGGCGAGAGGGCCAC |
| | | | | CATCAACTGCAAGTCCAGCCAGAGTGTCTTATCCAGCTCCAACAATAAGAACTACTTAAATTGGT |
| | | | | ACCAGCAGAAACCAGGACAGCCTCCTAAGTTGCTCATTTACTGGGCATCTACCCGGGAATCCGGG |
| | | | | GTCCCTGACCGATTCAGTGGCAGCGGGTCTGGGACAGATTTCACTCTCACCATCAGCAGCCTGCA |
| | | | | GGCTGAAGATGTGGCAGTTTATTACTGTCAGCAACATTATAGTGTTCCATTCACTTTCGGCCCTG |
| | | | | GGACCAAAGTGGATATCAAAGGAGGTGGTGGCTCCGAGGTGCAGCTGGTCGAGTCTGGAGGAGGA |
| | | | | TTGGTGCAGCCTGGAGGGTCATTGAAACTCTCATGTGCAGCCTCTGGATTCACCTTCAATAAGTA |
| | | | | CGCCATGAACTGGGTCCGCCAGGCTCCAGGAAAGGGTTTGGAATGGGTTGCTCGCATAAGAAGTA |
| | | | | AATATAATAATTATGCAACATATTATGCCGATTCAGTGAAAGACAGGTTCACCATCTCCAGAGAT |
| | | | | GATTCAAAAAACACTGCCTATCTACAAATGAACAACTTGAAAACTGAGGACACTGCCGTGTACTA |
| | | | | CTGTGTGAGACATGGGAACTTCGGTAATAGCTACATATCCTACTGGGCTTACTGGGGCCAAGGGA |
| | | | | CTCTGGTCACCGTCTCCTCAGGTGGTGGTGGTTCTGGCGGCGGCGGCTCCGGTGGTGGTGGTTCT |
| | | | | CAGACTGTTGTGACTCAGGAACCTTCACTCACCGTATCACCTGGTGGAACAGTCACACTCACTTG |
| | | | | TGGCTCCTCGACTGGGGCTGTTACATCTGGCTACTACCCAAACTGGGTCCAACAAAAACCAGGTC |
| | | | | AGGCACCCCGTGGTCTAATAGGTGGGACTAAGTTCCTCGCCCCCGGTACTCCTGCCAGATTCTCA |
| | | | | GGCTCCCTGCTTGGAGGCAAGGCTGCCCTCACCCTCTCAGGGGTACAGCCAGAGGATGAGGCAGA |
| | | | | ATATTACTGTGCTCTATGGTACAGCAACCGCTGGGTGTTCGGTGGAGGAACCAAACTGACTGTCC |
| | | | | TA |
| 225. | MCSP-F9 | artificial | aa | EVQLQESGPGLVKPSETLSLTCVVSGGSISSSNWWSWVRQPPGKGLEWLGTIYYNGNTYYNPSLK |
| | VH-VL-P x | | | SRVTISVDTSKNQFSLRLSSVTAADTAVYYCAKSWVSWFASWGQGTLVTVSSGGGGSGGGGSGGG |
| | H2C VH-VL-P | | | GSELVMTQSPDSLAVSLGERATINCKSSQSVLSSSNNKNYLNWYQQKPGQPPKLLIYWASTRESG |
| | | | | VPDRFSGSGSGTDFTLTISSLQAEDVAVYYCQQHYSVPFTFGPGTKVDIKSGGGGSEVQLLESGG |
| | | | | GLVQPGGSLKLSCAASGFTFNKYAMNWVRQAPGKGLEWVARIRSKYNNYATYYADSVKDRFTISR |
| | | | | DDSKNTAYLQMNNLKTEDTAVYYCVRHGNFGNSYISYWAYWGQGTLVTVSSGGGGSGGGGSGGGG |
| | | | | SELVVTQEPSLTVSPGGTVTLTCGSSTGAVTSGYYPNWVQQKPGQAPRGLIGGTKFLAPGTPARF |
| | | | | SGSLLGGKAALTLSGVQPEDEAEYYCALWYSNRWVFGGGTKLTVL |
| 226. | MCSP-F9 | artificial | nt | GAGGTGCAGCTGCAAGAGTCTGGCCCAGGACTGGTGAAGCCTTCGGAGACCCTGTCCCTCACCTG |
| | VH-VL-P x | | | CGTTGTCTCTGGTGGCTCCATCAGCAGTAGTAACTGGTGGAGCTGGGTCCGCCAGCCCCCAGGGA |
| | H2C VH-VL-P | | | AGGGACTGGAGTGGCTTGGGACTATCTATTATAATGGGAATACCTACTACAACCCGTCCCTCAAG |
| | | | | AGTCGAGTCACCATCTCCGTAGACACGTCCAAGAACCAGTTCTCCCTGAGGCTGAGCTCTGTGAC |
| | | | | CGCCGCAGACACGGCCGTGTATTACTGTGCGAAATCCTGGGTCTCCTGGTTTGCTTCCTGGGGTC |
| | | | | AAGGAACCTTGGTCACCGTCTCCTCAGGTGGTGGTGGTTCTGGCGGCGGCGGCTCCGGTGGTGGT |
| | | | | GGTTCTGAGCTCGTGATGACACAGTCTCCAGACTCCCTGGCTGTGTCTCTGGGCGAGAGGGCCAC |
| | | | | CATCAACTGCAAGTCCAGCCAGAGTGTCTTATCCAGCTCCAACAATAAGAACTACTTAAATTGGT |
| | | | | ACCAGCAGAAACCAGGACAGCCTCCTAAGTTGCTCATTTACTGGGCATCTACCCGGGAATCCGGG |
| | | | | GTCCCTGACCGATTCAGTGGCAGCGGGTCTGGGACAGATTTCACTCTCACCATCAGCAGCCTGCA |
| | | | | GGCTGAAGATGTGGCAGTTTATTACTGTCAGCAACATTATAGTGTTCCATTCACTTTCGGCCCTG |
| | | | | GGACCAAAGTGGATATCAAATCCGGAGGTGGTGGATCCGAGGTGCAGCTGCTCGAGTCTGGAGGA |
| | | | | GGATTGGTGCAGCCTGGAGGGTCATTGAAACTCTCATGTGCAGCCTCTGGATTCACCTTCAATAA |
| | | | | GTACGCCATGAACTGGGTCCGCCAGGCTCCAGGAAAGGGTTTGGAATGGGTTGCTCGCATAAGAA |
| | | | | GTAAATATAATAATTATGCAACATATTATGCCGATTCAGTGAAAGACAGGTTCACCATCTCCAGA |
| | | | | GATGATTCAAAAAACACTGCCTATCTACAAATGAACAACTTGAAAACTGAGGACACTGCCGTGTA |
| | | | | CTACTGTGTGAGACATGGGAACTTCGGTAATAGCTACATATCCTACTGGGCTTACTGGGGCCAAG |
| | | | | GGACTCTGGTCACCGTCTCCTCAGGTGGTGGTGGTTCTGGCGGCGGCGGCTCCGGTGGTGGTGGT |
| | | | | TCTGAGCTCGTTGTGACTCAGGAACCTTCACTCACCGTATCACCTGGTGGAACAGTCACACTCAC |
| | | | | TTGTGGCTCCTCGACTGGGGCTGTTACATCTGGCTACTACCCAAACTGGGTCCAACAAAAACCAG |
| | | | | GTCAGGCACCCCGTGGTCTAATAGGTGGGACTAAGTTCCTCGCCCCCGGTACTCCTGCCAGATTC |
| | | | | TCAGGCTCCCTGCTTGGAGGCAAGGCTGCCCTCACCCTCTCAGGGGTACAGCCAGAGGATGAGGC |
| | | | | AGAATATTACTGTGCTCTATGGTACAGCAACCGCTGGGTGTTCGGTGGAGGAACCAAACTGACTG |
| | | | | TCCTA |
| 227. | MCSP-F9 | artificial | aa | EVQLQESGPGLVKPSETLSLTCVVSGGSISSSNWWSWVRQPPGKGLEWLGTIYYNGNTYYNPSLK |
| | VH-VL-P x | | | SRVTISVDTSKNQFSLRLSSVTAADTAVYYCAKSWVSWFASWGQGTLVTVSSGGGGSGGGGSGGG |
| | G4H VH-VL-P | | | GSELVMTQSPDSLAVSLGERATINCKSSQSVLSSSNNKNYLNWYQQKPGQPPKLLIYWASTRESG |
| | | | | VPDRFSGSGSGTDFTLTISSLQAEDVAVYYCQQHYSVPFTFGPGTKVDIKSGGGGSEVQLLESGG |
| | | | | GLVQPGGSLKLSCAASGFTFNRYAMNWVRQAPGKGLEWVARIRSKYNNYATYYADSVKGRFTISR |
| | | | | DDSKNTAYLQMNNLKTEDTAVYYCVRHGNFGNSYLSYFAYWGQGTLVTVSSGGGGSGGGGSGGGG |
| | | | | SELVVTQEPSLTVSPGGTVTLTCGSSTGAVTSGYYPNWVQQKPGQAPRGLIGGTKFLAPGTPARF |
| | | | | SGSLLGGKAALTLSGVQPEDEAEYYCALWYSNRWVFGGGTKLTVL |
| 228. | MCSP-F9 | artificial | nt | GAGGTGCAGCTGCAAGAGTCTGGCCCAGGACTGGTGAAGCCTTCGGAGACCCTGTCCCTCACCTG |
| | VH-VL-P x | | | CGTTGTCTCTGGTGGCTCCATCAGCAGTAGTAACTGGTGGAGCTGGGTCCGCCAGCCCCCAGGGA |
| | G4H VH-VL-P | | | AGGGACTGGAGTGGCTTGGGACTATCTATTATAATGGGAATACCTACTACAACCCGTCCCTCAAG |
| | | | | AGTCGAGTCACCATCTCCGTAGACACGTCCAAGAACCAGTTCTCCCTGAGGCTGAGCTCTGTGAC |
| | | | | CGCCGCAGACACGGCCGTGTATTACTGTGCGAAATCCTGGGTCTCCTGGTTTGCTTCCTGGGGTC |
| | | | | AAGGAACCTTGGTCACCGTCTCCTCAGGTGGTGGTGGTTCTGGCGGCGGCGGCTCCGGTGGTGGT |
| | | | | GGTTCTGAGCTCGTGATGACACAGTCTCCAGACTCCCTGGCTGTGTCTCTGGGCGAGAGGGCCAC |
| | | | | CATCAACTGCAAGTCCAGCCAGAGTGTCTTATCCAGCTCCAACAATAAGAACTACTTAAATTGGT |
| | | | | ACCAGCAGAAACCAGGACAGCCTCCTAAGTTGCTCATTTACTGGGCATCTACCCGGGAATCCGGG |
| | | | | GTCCCTGACCGATTCAGTGGCAGCGGGTCTGGGACAGATTTCACTCTCACCATCAGCAGCCTGCA |
| | | | | GGCTGAAGATGTGGCAGTTTATTACTGTCAGCAACATTATAGTGTTCCATTCACTTTCGGCCCTG |
| | | | | GGACCAAAGTGGATATCAAATCCGGAGGTGGTGGATCCGAGGTGCAGCTGCTCGAGTCTGGAGGA |
| | | | | GGATTGGTGCAGCCTGGAGGGTCATTGAAACTCTCATGTGCAGCCTCTGGATTCACCTTCAATCG |
| | | | | CTACGCCATGAACTGGGTCCGCCAGGCTCCAGGAAAGGGTTTGGAATGGGTTGCTCGCATAAGAA |
| | | | | GTAAATATAATAATTATGCAACATATTATGCCGATTCAGTGAAAGGGAGGTTCACCATCTCCAGA |
| | | | | GATGATTCAAAAAACACTGCCTATCTACAAATGAACAACTTGAAAACTGAGGACACTGCCGTGTA |
| | | | | CTACTGTGTGAGACATGGGAACTTCGGTAATAGCTACTTATCCTACTTCGCTTACTGGGGCCAAG |
| | | | | GGACTCTGGTCACCGTCTCCTCAGGTGGTGGTGGTTCTGGCGGCGGCGGCTCCGGTGGTGGTGGT |
| | | | | TCTGAGCTCGTTGTGACTCAGGAACCTTCACTCACCGTATCACCTGGTGGAACAGTCACACTCAC |
| | | | | TTGTGGCTCCTCGACTGGGGCTGTTACATCTGGCTACTACCCAAACTGGGTCCAACAAAAACCAG |
| | | | | GTCAGGCACCCCGTGGTCTAATAGGTGGGACTAAGTTCCTCGCCCCCGGTACTCCTGCCAGATTC |
| | | | | TCAGGCTCCCTGCTTGGAGGCAAGGCTGCCCTCACCCTCTCAGGGGTACAGCCAGAGGATGAGGC |
| | | | | AGAATATTACTGTGCTCTATGGTACAGCAACCGCTGGGTGTTCGGTGGAGGAACCAAACTGACTG |
| | | | | TCCTA |
| 229. | 1-27 CD3ε-Fc | artificial | aa | QDGNEEMGGITQTPYKVSISGTTVILTSGEPKSCDKTHTCPPCPAPELLGGPSVFLFPPKPKDTL |
| | | | | MISRTPEVTCVVVDVSHEDPEVKFNWYVDGVEVHNAKTKPREEQYNSTYRVVSVLTVLHQDWLNG |
| | | | | KEYKCKVSNKALPAPIEKTISKAKGQPREPQVYTLPPSREEMTKNQVSLTCLVKGFYPSDIAVEW |
| | | | | ESNGQPENNYKTTPPVLDSDGSFFLYSKLTVDKSRWQQGNVFSCSVMHEALHNHYTQKSLSLSPG |
| | | | | KHHHHHH |
| 230. | 1-27 CD3ε-Fc | artificial | nt | ATGGGATGGAGCTGTATCATCCTCTTCTTGGTAGCAACAGCTACAGGTGTACACTCCCAAGATGG |
| | | | | TAATGAAGAAATGGGTGGTATTACACAGACACCATATAAAGTCTCCATCTCTGGAACCACAGTAA |
| | | | | TATTGACATCCGGAGAGCCCAAATCTTGTGACAAAACTCACACATGCCCACCGTGCCCAGCACCT |
| | | | | GAACTCCTGGGGGGACCGTCAGTCTTCCTCTTCCCCCCAAAACCCAAGGACACCCTCATGATCTC |
| | | | | CCGGACCCCTGAGGTCACATGCGTGGTGGTGGACGTGAGCCACGAAGACCCTGAGGTCAAGTTCA |
| | | | | ACTGGTACGTGGACGGCGTGGAGGTGCATAATGCCAAGACAAAGCCGCGGGAGGAGCAGTACAAC |
| | | | | AGCACGTACCGTGTGGTCAGCGTCCTCACCGTCCTGCACCAGGACTGGCTGAATGGCAAGGAGTA |
| | | | | CAAGTGCAAGGTCTCCAACAAAGCCCTCCCAGCCCCCATCGAGAAAACCATCTCCAAAGCCAAAG |
| | | | | GGCAGCCCCGAGAACCACAGGTGTACACCCTGCCCCCATCCCGGGAGGAGATGACCAAGAACCAG |
| | | | | GTCAGCCTGACCTGCCTGGTCAAAGGCTTCTATCCCAGCGACATCGCCGTGGAGTGGGAGAGCAA |
| | | | | TGGGCAGCCGGAGAACAACTACAAGACCACGCCTCCCGTGCTGGACTCCGACGGCTCCTTCTTCC |
| | | | | TCTATAGCAAGCTCACCGTGGACAAGAGCAGGTGGCAGCAGGGGAACGTCTTCTCATGCTCCGTG |
| | | | | ATGCATGAGGCTCTGCACAACCACTACACGCAGAAGAGCCTCTCCCTGTCCCCGGGTAAACATCA |
| | | | | TCACCATCATCAT |
| 231. | human 1-27 | artificial | aa | QDGNEEMGGITQTPYKVSISGTTVILTDYKDDDDKTASFAAAQKECVCENYKLAVNCFLNDNGQC |
| | CD3ε - | | | QCTSIGAQNTVLCSKLAAKCLVMKAEMNGSKLGRRAKPEGALQNNDGLYDPDCDESGLFKAKQCN |
| | EpCAM | | | GTSTCWCVNTAGVRRTDKDTEITCSERVRTYWIIIELKHKAREKPYDVQSLRTALEEAIKTRYQL |
| | | | | DPKFITNILYEDNVITIDLVQNSSQKTQNDVDIADVAYYFEKDVKGESLFHSKKMDLRVNGEQLD |
| | | | | LDPGQTLIYYVDEKAPEFSMQGLKAGVIAVIVVVVIAIVAGIVVLVISRKKRMAKYEKAEIKEMG |
| | | | | EMHRELNA |
| 232. | human 1-27 | artificial | nt | ATGGGATGGAGCTGTATCATCCTCTTCTTGGTAGCAACAGCTACAGGTGTACACTCCCAAGATGG |
| | CD3ε - | | | TAATGAAGAAATGGGTGGTATTACACAGACACCATATAAAGTCTCCATCTCTGGAACCACAGTAA |
| | EpCAM | | | TATTGACAGATTACAAGGACGACGATGACAAGACTGCGAGTTTTGCCGCAGCTCAGAAAGAATGT |
| | | | | GTCTGTGAAAACTACAAGCTGGCCGTAAACTGCTTTTTGAATGACAATGGTCAATGCCAGTGTAC |
| | | | | TTCGATTGGTGCACAAAATACTGTCCTTTGCTCAAAGCTGGCTGCCAAATGTTTGGTGATGAAGG |
| | | | | CAGAAATGAACGGCTCAAAACTTGGGAGAAGAGCGAAACCTGAAGGGGCTCTCCAGAACAATGAT |
| | | | | GGCCTTTACGATCCTGACTGCGATGAGAGCGGGCTCTTTAAGGCCAAGCAGTGCAACGGCACCTC |
| | | | | CACGTGCTGGTGTGTGAACACTGCTGGGGTCAGAAGAACTGACAAGGACACTGAAATAACCTGCT |
| | | | | CTGAGCGAGTGAGAACCTACTGGATCATCATTGAATTAAAACACAAAGCAAGAGAAAAACCTTAT |
| | | | | GATGTTCAAAGTTTGCGGACTGCACTTGAGGAGGCGATCAAAACGCGTTATCAACTGGATCCAAA |
| | | | | ATTTATCACAAATATTTTGTATGAGGATAATGTTATCACTATTGATCTGGTTCAAAATTCTTCTC |
| | | | | AGAAAACTCAGAATGATGTGGACATAGCTGATGTGGCTTATTATTTTGAAAAAGATGTTAAAGGT |
| | | | | GAATCCTTGTTTCATTCTAAGAAAATGGACCTGAGAGTAAATGGGGAACAACTGGATCTGGATCC |
| | | | | TGGTCAAACTTTAATTTATTATGTCGATGAAAAAGCACCTGAATTCTCAATGCAGGGTCTAAAAG |
| | | | | CTGGTGTTATTGCTGTTATTGTGGTTGTGGTGATAGCAATTGTTGCTGGAATTGTTGTGCTGGTT |
| | | | | ATTTCCAGAAAGAAGAGAATGGCAAAGTATGAGAAGGCTGAGATAAAGGAGATGGGTGAGATGCA |
| | | | | TAGGGAACTCAATGCA |
| 233. | marmoset 1-27 | artificial | aa | QDGNEEMGDTTQNPYKVSISGTTVTLTDYKDDDDKTASFAAAQKECVCENYKLAVNCFLNDNGQC |
| | CD3ε -EpCAM | | | QCTSIGAQNTVLCSKLAAKCLVMKAEMNGSKLGRRAKPEGALQNNDGLYDPDCDESGLFKAKQCN |
| | | | | GTSTCWCVNTAGVRRTDKDTEITCSERVRTYWIIIELKHKAREKPYDVQSLRTALEEAIKTRYQL |
| | | | | DPKFITNILYEDNVITIDLVQNSSQKTQNDVDIADVAYYFEKDVKGESLFHSKKMDLRVNGEQLD |
| | | | | LDPGQTLIYYVDEKAPEFSMQGLKAGVIAVIVVVVIAIVAGIVVLVISRKKRMAKYEKAEIKEMG |
| | | | | EMHRELNA |
| 234. | marmoset 1-27 | artificial | nt | ATGGGATGGAGCTGTATCATCCTCTTCTTGGTAGCAACAGCTACAGGTGTACACTCCCAGGACGG |
| | CD3ε -EpCAM | | | TAATGAAGAAATGGGTGATACTACACAGAACCCATATAAAGTTTCCATCTCAGGAACCACAGTAA |
| | | | | CACTGACAGATTACAAGGACGACGATGACAAGACTGCGAGTTTTGCCGCAGCTCAGAAAGAATGT |
| | | | | GTCTGTGAAAACTACAAGCTGGCCGTAAACTGCTTTTTGAATGACAATGGTCAATGCCAGTGTAC |
| | | | | TTCGATTGGTGCACAAAATACTGTCCTTTGCTCAAAGCTGGCTGCCAAATGTTTGGTGATGAAGG |
| | | | | CAGAAATGAACGGCTCAAAACTTGGGAGAAGAGCGAAACCTGAAGGGGCTCTCCAGAACAATGAT |
| | | | | GGCCTTTACGATCCTGACTGCGATGAGAGCGGGCTCTTTAAGGCCAAGCAGTGCAACGGCACCTC |
| | | | | CACGTGCTGGTGTGTGAACACTGCTGGGGTCAGAAGAACTGACAAGGACACTGAAATAACCTGCT |
| | | | | CTGAGCGAGTGAGAACCTACTGGATCATCATTGAATTAAAACACAAAGCAAGAGAAAAACCTTAT |
| | | | | GATGTTCAAAGTTTGCGGACTGCACTTGAGGAGGCGATCAAAACGCGTTATCAACTGGATCCAAA |
| | | | | ATTTATCACAAATATTTTGTATGAGGATAATGTTATCACTATTGATCTGGTTCAAAATTCTTCTC |
| | | | | AGAAAACTCAGAATGATGTGGACATAGCTGATGTGGCTTATTATTTTGAAAAAGATGTTAAAGGT |
| | | | | GAATCCTTGTTTCATTCTAAGAAAATGGACCTGAGAGTAAATGGGGAACAACTGGATCTGGATCC |
| | | | | TGGTCAAACTTTAATTTATTATGTCGATGAAAAAGCACCTGAATTCTCAATGCAGGGTCTAAAAG |
| | | | | CTGGTGTTATTGCTGTTATTGTGGTTGTGGTGATAGCAATTGTTGCTGGAATTGTTGTGCTGGTT |
| | | | | ATTTCCAGAAAGAAGAGAATGGCAAAGTATGAGAAGGCTGAGATAAAGGAGATGGGTGAGATGCA |
| | | | | TAGGGAACTCAATGCA |
| 235. | tamarin 1-27 | artificial | aa | QDGNEEMGDTTQNPYKVSISGTTVTLTDYKDDDDKTASFAAAQKECVCENYKLAVNCFLNDNGQC |
| | CD3ε - | | | QCTSIGAQNTVLCSKLAAKCLVMKAEMNGSKLGRRAKPEGALQNNDGLYDPDCDESGLFKAKQCN |
| | EpCAM | | | GTSTCWCVNTAGVRRTDKDTEITCSERVRTYWIIIELKHKAREKPYDVQSLRTALEEAIKTRYQL |
| | | | | DPKFITNILYEDNVITIDLVQNSSQKTQNDVDIADVAYYFEKDVKGESLFHSKKMDLRVNGEQLD |
| | | | | LDPGQTLIYYVDEKAPEFSMQGLKAGVIAVIVVVVIAIVAGIVVLVISRKKRMAKYEKAEIKEMG |
| | | | | EMHRELNA |
| 236. | tamarin 1-27 | artificial | nt | ATGGGATGGAGCTGTATCATCCTCTTCTTGGTAGCAACAGCTACAGGTGTACACTCCCAGGACGG |
| | CD3ε - | | | TAATGAAGAAATGGGTGATACTACACAGAACCCATATAAAGTTTCCATCTCAGGAACCACAGTAA |
| | EpCAM | | | CACTGACAGATTACAAGGACGACGATGACAAGACTGCGAGTTTTGCCGCAGCTCAGAAAGAATGT |
| | | | | GTCTGTGAAAACTACAAGCTGGCCGTAAACTGCTTTTTGAATGACAATGGTCAATGCCAGTGTAC |
| | | | | TTCGATTGGTGCACAAAATACTGTCCTTTGCTCAAAGCTGGCTGCCAAATGTTTGGTGATGAAGG |
| | | | | CAGAAATGAACGGCTCAAAACTTGGGAGAAGAGCGAAACCTGAAGGGGCTCTCCAGAACAATGAT |
| | | | | GGCCTTTACGATCCTGACTGCGATGAGAGCGGGCTCTTTAAGGCCAAGCAGTGCAACGGCACCTC |
| | | | | CACGTGCTGGTGTGTGAACACTGCTGGGGTCAGAAGAACTGACAAGGACACTGAAATAACCTGCT |
| | | | | CTGAGCGAGTGAGAACCTACTGGATCATCATTGAATTAAAACACAAAGCAAGAGAAAAACCTTAT |
| | | | | GATGTTCAAAGTTTGCGGACTGCACTTGAGGAGGCGATCAAAACGCGTTATCAACTGGATCCAAA |
| | | | | ATTTATCACAAATATTTTGTATGAGGATAATGTTATCACTATTGATCTGGTTCAAAATTCTTCTC |
| | | | | AGAAAACTCAGAATGATGTGGACATAGCTGATGTGGCTTATTATTTTGAAAAAGATGTTAAAGGT |
| | | | | GAATCCTTGTTTCATTCTAAGAAAATGGACCTGAGAGTAAATGGGGAACAACTGGATCTGGATCC |
| | | | | TGGTCAAACTTTAATTTATTATGTCGATGAAAAAGCACCTGAATTCTCAATGCAGGGTCTAAAAG |
| | | | | CTGGTGTTATTGCTGTTATTGTGGTTGTGGTGATAGCAATTGTTGCTGGAATTGTTGTGCTGGTT |
| | | | | ATTTCCAGAAAGAAGAGAATGGCAAAGTATGAGAAGGCTGAGATAAAGGAGATGGGTGAGATGCA |
| | | | | TAGGGAACTCAATGCA |
| 237. | squirrel | artificial | aa | QDGNEEIGDTTQNPYKVSISGTTVTLTDYKDDDDKTASFAAAQKECVCENYKLAVNCFLNDNGQC |
| | monkey 1-27 | | | QCTSIGAQNTVLCSKLAAKCLVMKAEMNGSKLGRRAKPEGALQNNDGLYDPDCDESGLFKAKQCN |
| | CD3ε -EpCAM | | | GTSTCWCVNTAGVRRTDKDTEITCSERVRTYWIIIELKHKAREKPYDVQSLRTALEEAIKTRYQL |
| | | | | DPKFITNILYEDNVITIDLVQNSSQKTQNDVDIADVAYYFEKDVKGESLFHSKKMDLRVNGEQLD |
| | | | | LDPGQTLIYYVDEKAPEFSMQGLKAGVIAVIVVVVIAIVAGIVVLVISRKKRMAKYEKAEIKEMG |
| | | | | EMHRELNA |
| 238. | squirrel | artificial | nt | ATGGGATGGAGCTGTATCATCCTCTTCTTGGTAGCAACAGCTACAGGTGTACACTCCCAGGACGG |
| | monkey 1-27 | | | TAATGAAGAGATTGGTGATACTACCCAGAACCCATATAAAGTTTCCATCTCAGGAACCACAGTAA |
| | CD3ε -EpCAM | | | CACTGACAGATTACAAGGACGACGATGACAAGACTGCGAGTTTTGCCGCAGCTCAGAAAGAATGT |
| | | | | GTCTGTGAAAACTACAAGCTGGCCGTAAACTGCTTTTTGAATGACAATGGTCAATGCCAGTGTAC |
| | | | | TTCGATTGGTGCACAAAATACTGTCCTTTGCTCAAAGCTGGCTGCCAAATGTTTGGTGATGAAGG |
| | | | | CAGAAATGAACGGCTCAAAACTTGGGAGAAGAGCGAAACCTGAAGGGGCTCTCCAGAACAATGAT |
| | | | | GGCCTTTACGATCCTGACTGCGATGAGAGCGGGCTCTTTAAGGCCAAGCAGTGCAACGGCACCTC |
| | | | | CACGTGCTGGTGTGTGAACACTGCTGGGGTCAGAAGAACTGACAAGGACACTGAAATAACCTGCT |
| | | | | CTGAGCGAGTGAGAACCTACTGGATCATCATTGAATTAAAACACAAAGCAAGAGAAAAACCTTAT |
| | | | | GATGTTCAAAGTTTGCGGACTGCACTTGAGGAGGCGATCAAAACGCGTTATCAACTGGATCCAAA |
| | | | | ATTTATCACAAATATTTTGTATGAGGATAATGTTATCACTATTGATCTGGTTCAAAATTCTTCTC |
| | | | | AGAAAACTCAGAATGATGTGGACATAGCTGATGTGGCTTATTATTTTGAAAAAGATGTTAAAGGT |
| | | | | GAATCCTTGTTTCATTCTAAGAAAATGGACCTGAGAGTAAATGGGGAACAACTGGATCTGGATCC |
| | | | | TGGTCAAACTTTAATTTATTATGTCGATGAAAAAGCACCTGAATTCTCAATGCAGGGTCTAAAAG |
| | | | | CTGGTGTTATTGCTGTTATTGTGGTTGTGGTGATAGCAATTGTTGCTGGAATTGTTGTGCTGGTT |
| | | | | ATTTCCAGAAAGAAGAGAATGGCAAAGTATGAGAAGGCTGAGATAAAGGAGATGGGTGAGATGCA |
| | | | | TAGGGAACTCAATGCA |
| 239. | swine 1-27 | artificial | aa | QEDIERPDEDTQKTFKVSISGDKVELTDYKDDDDKTASFAAAQKECVCENYKLAVNCFLNDNGQC |
| | CD3ε - | | | QCTSIGAQNTVLCSKLAAKCLVMKAEMNGSKLGRRAKPEGALQNNDGLYDPDCDESGLFKAKQCN |
| | EpCAM | | | GTSTCWCVNTAGVRRTDKDTEITCSERVRTYWIIIELKHKAREKPYDVQSLRTALEEAIKTRYQL |
| | | | | DPKFITNILYEDNVITIDLVQNSSQKTQNDVDIADVAYYFEKDVKGESLFHSKKMDLRVNGEQLD |
| | | | | LDPGQTLIYYVDEKAPEFSMQGLKAGVIAVIVVVVIAIVAGIVVLVISRKKRMAKYEKAEIKEMG |
| | | | | EMHRELNA |
| 240. | swine 1-27 | artificial | nt | ATGGGATGGAGCTGTATCATCCTCTTCTTGGTAGCAACAGCTACAGGTGTACACTCCCAAGAAGA |
| | CD3ε - | | | CATTGAAAGACCAGATGAAGATACACAGAAAACATTTAAAGTCTCCATCTCTGGAGACAAAGTAG |
| | EpCAM | | | AGCTGACAGATTACAAGGACGACGATGACAAGACTGCGAGTTTTGCCGCAGCTCAGAAAGAATGT |
| | | | | GTCTGTGAAAACTACAAGCTGGCCGTAAACTGCTTTTTGAATGACAATGGTCAATGCCAGTGTAC |
| | | | | TTCGATTGGTGCACAAAATACTGTCCTTTGCTCAAAGCTGGCTGCCAAATGTTTGGTGATGAAGG |
| | | | | CAGAAATGAACGGCTCAAAACTTGGGAGAAGAGCGAAACCTGAAGGGGCTCTCCAGAACAATGAT |
| | | | | GGCCTTTACGATCCTGACTGCGATGAGAGCGGGCTCTTTAAGGCCAAGCAGTGCAACGGCACCTC |
| | | | | CACGTGCTGGTGTGTGAACACTGCTGGGGTCAGAAGAACTGACAAGGACACTGAAATAACCTGCT |
| | | | | CTGAGCGAGTGAGAACCTACTGGATCATCATTGAATTAAAACACAAAGCAAGAGAAAAACCTTAT |
| | | | | GATGTTCAAAGTTTGCGGACTGCACTTGAGGAGGCGATCAAAACGCGTTATCAACTGGATCCAAA |
| | | | | ATTTATCACAAATATTTTGTATGAGGATAATGTTATCACTATTGATCTGGTTCAAAATTCTTCTC |
| | | | | AGAAAACTCAGAATGATGTGGACATAGCTGATGTGGCTTATTATTTTGAAAAAGATGTTAAAGGT |
| | | | | GAATCCTTGTTTCATTCTAAGAAAATGGACCTGAGAGTAAATGGGGAACAACTGGATCTGGATCC |
| | | | | TGGTCAAACTTTAATTTATTATGTCGATGAAAAAGCACCTGAATTCTCAATGCAGGGTCTAAAAG |
| | | | | CTGGTGTTATTGCTGTTATTGTGGTTGTGGTGATAGCAATTGTTGCTGGAATTGTTGTGCTGGTT |
| | | | | ATTTCCAGAAAGAAGAGAATGGCAAAGTATGAGAAGGCTGAGATAAAGGAGATGGGTGAGATGCA |
| | | | | TAGGGAACTCAATGCA |
| 241. | human | human | aa | QDGNEEMGGITQTPYKVSISGTTVILTCPQYPGSEILWQHNDKNIGGDEDDKNIGSDEDHLSLKE |
| | CD3 epsilon | | | FSELEQSGYYVCYPRGSKPEDANFYLYLRARVCENCMEMDVMSVATIVIVDICITGGLLLLVYYW |
| | chain | | | SKNRKAKAKPVTRGAGAGGRQRGQNKERPPPVPNPDYEPIRKGQRDLYSGLNQRRI |
| 242. | human | human | nt | ATGCAGTCGGGCACTCACTGGAGAGTTCTGGGCCTCTGCCTCTTATCAGTTGGCGTTTGGGGGCA |
| | CD3 epsilon | | | AGATGGTAATGAAGAAATGGGTGGTATTACACAGACACCATATAAAGTCTCCATCTCTGGAACCA |
| | chain | | | CAGTAATATTGACATGCCCTCAGTATCCTGGATCTGAAATACTATGGCAACACAATGATAAAAAC |
| | | | | ATAGGCGGTGATGAGGATGATAAAAACATAGGCAGTGATGAGGATCACCTGTCACTGAAGGAATT |
| | | | | TTCAGAATTGGAGCAAAGTGGTTATTATGTCTGCTACCCCAGAGGAAGCAAACCAGAAGATGCGA |
| | | | | ACTTTTATCTCTACCTGAGGGCACGCGTGTGTGAGAACTGCATGGAGATGGATGTGATGTCGGTG |
| | | | | GCCACAATTGTCATAGTGGACATCTGCATCACTGGGGGCTTGCTGCTGCTGGTTTACTACTGGAG |
| | | | | CAAGAATAGAAAGGCCAAGGCCAAGCCTGTGACACGAGGAGCGGGTGCTGGCGGCAGGCAAAGGG |
| | | | | GACAAAACAAGGAGAGGCCACCACCTGTTCCCAACCCAGACTATGAGCCCATCCGGAAAGGCCAG |
| | | | | CGGGACCTGTATTCTGGCCTGAATCAGAGACGCATC |
| 243. | 19 amino acid | artificial | aa | MGWSCIILFLVATATGVHS |
| | immuno- | | | |
| | globulin | | | |
| | leader | | | |
| | peptide | | | |
| 244. | 19 amino acid | artificial | nt | ATGGGATGGAGCTGTATCATCCTCTTCTTGGTAGCAACAGCTACAGGTGTACACTCC |
| | immuno- | | | |
| | globulin | | | |
| | leader | | | |
| | peptide | | | |
| 245. | murine IgG1 | murine | aa | AKTTPPSVYPLAPGSAAQTNSMVTLGCLVKGYFPEPVTVTWNSGSLSSGVHTFPAVLQSDLYTLS |
| | heavy chain | | | SSVTVPSSTWPSETVTCNVAHPASSTKVDKKIVPRDCGCKPCICTVPEVSSVFIFPPKPKDVLTI |
| | constant | | | TLTPKVTCVVVDISKDDPEVQFSWFVDDVEVHTAQTQPREEQFNSTFRSVSELPIMHQDWLNGKE |
| | region | | | FKCRVNSAAFPAPIEKTISKTKGRPKAPQVYTIPPPKEQMAKDKVSLTCMITDFFPEDITVEWQW |
| | | | | NGQPAENYKNTQPIMDTDGSYFVYSKLNVQKSNWEAGNTFTCSVLHEGLHNHHTEKSLSHSPGK |
| 246. | murine IgG1 | murine | nt | GCCAAAACGACACCCCCATCTGTCTATCCACTGGCCCCTGGATCTGCTGCCCAAACTAACTCCAT |
| | heavy chain | | | GGTGACCCTGGGATGCCTGGTCAAGGGCTATTTCCCTGAGCCAGTGACAGTGACCTGGAACTCTG |
| | constant | | | GATCCCTGTCCAGCGGTGTGCACACCTTCCCAGCTGTCCTGCAGTCTGACCTCTACACTCTGAGC |
| | region | | | AGCTCAGTGACTGTCCCCTCCAGCACCTGGCCCAGCGAGACCGTCACCTGCAACGTTGCCCACCC |
| | | | | GGCCAGCAGCACCAAGGTGGACAAGAAAATTGTGCCCAGGGATTGTGGTTGTAAGCCTTGCATAT |
| | | | | GTACAGTCCCAGAAGTATCATCTGTCTTCATCTTCCCCCCAAAGCCCAAGGATGTGCTCACCATT |
| | | | | ACTCTGACTCCTAAGGTCACGTGTGTTGTGGTAGACATCAGCAAGGATGATCCCGAGGTCCAGTT |
| | | | | CAGCTGGTTTGTAGATGATGTGGAGGTGCACACAGCTCAGACGCAACCCCGGGAGGAGCAGTTCA |
| | | | | ACAGCACTTTCCGCTCAGTCAGTGAACTTCCCATCATGCACCAGGACTGGCTCAATGGCAAGGAG |
| | | | | TTCAAATGCAGGGTCAACAGTGCAGCTTTCCCTGCCCCCATCGAGAAAACCATCTCCAAAACCAA |
| | | | | AGGCAGACCGAAGGCTCCACAGGTGTACACCATTCCACCTCCCAAGGAGCAGATGGCCAAGGATA |
| | | | | AAGTCAGTCTGACCTGCATGATAACAGACTTCTTCCCTGAAGACATTACTGTGGAGTGGCAGTGG |
| | | | | AATGGGCAGCCAGCGGAGAACTACAAGAACACTCAGCCCATCATGGACACAGATGGCTCTTACTT |
| | | | | CGTCTACAGCAAGCTCAATGTGCAGAAGAGCAACTGGGAGGCAGGAAATACTTTCACCTGCTCTG |
| | | | | TGTTACATGAGGGCCTGCACAACCACCATACTGAGAAGAGCCTCTCCCACTCTCCTGGTAAA |
| 247. | human lambda | human | aa | GQPKAAPSVTLFPPSSEELQANKATLVCLISDFYPGAVTVAWKADSSPVKAGVETTTPSKQSNNK |
| | light chain | | | YAASSYLSLTPEQWKSHKSYSCQVTHEGSTVEKTVAPTECS |
| | constant | | | |
| | region | | | |
| 248. | human lambda | human | nt | GGTCAGCCCAAGGCTGCCCCCTCGGTCACTCTGTTCCCACCCTCCTCTGAGGAGCTTCAAGCCAA |
| | light chain | | | CAAGGCCACACTGGTGTGTCTCATAAGTGACTTCTACCCGGGAGCCGTGACAGTGGCCTGGAAGG |
| | constant | | | CAGATAGCAGCCCCGTCAAGGCGGGAGTGGAGACCACCACACCCTCCAAACAAAGCAACAACAAG |
| | region | | | TACGCGGCCAGCAGCTACCTGAGCCTGACGCCTGAGCAGTGGAAGTCCCACAAAAGCTACAGCTG |
| | | | | CCAGGTCACGCATGAAGGGAGCACCGTGGAGAAGACAGTGGCCCCTACAGAATGTTCA |
| 249. | c-terminal | human | aa | DYKDDDDKSRTRSGSQLDGGLVLFSHRGTLDGGFRFRLSDGEHTSPGHFFRVTAQKQVLLSLKGS |
| | domain | | | QTLTVCPGSVQPLSSQTLRASSSAGTDPQLLLYRVVRGPQLGRLFHAQQDSTGEALVNFTQAEVY |
| | construct of | | | AGNILYEHEMPPEPFWEAHDTLELQLSSPPARDVAATLAVAVSFEAACPQRPSHLWKNKGLWVPE |
| | human MCSP | | | GQRARITVAALDASNLLASVPSPQRSEHDVLFQVTQFPSRGQLLVSEEPLHAGQPHFLQSQLAAG |
| | | | | QLVYAHGGGGTQQDGFHFRAHLQGPAGASVAGPQTSEAFAITVRDVNERPPQPQASVPLRLTRGS |
| | | | | RAPISRAQLSVVDPDSAPGEIEYEVQRAPHNGFLSLVGGGLGPVTRFTQADVDSGRLAFVANGSS |
| | | | | VAGIFQLSMSDGASPPLPMSLAVDILPSAIEVQLRAPLEVPQALGRSSLSQQQLRVVSDREEPEA |
| | | | | AYRLIQGPQYGHLLVGGRPTSAFSQFQIDQGEVVFAFTNSSSSHDHFRVLALARGVNASAVVNVT |
| | | | | VRALLHVWAGGPWPQGATLRLDPTVLDAGELANRTDSVPRFRLLEGPRHGRVVRVPRARTEPGGS |
| | | | | QLVEQFTQQDLEDGRLGLEVGRPEGRAPGPAGDSLTLELWAQGVPPAVASLDFATEPYNAARPYS |
| | | | | VALLSVPEAARTEAGKPESSTPTGEPGPMASSPEPAVAKGGFLSFLEANMFSVIIPMCLVLLLLA |
| | | | | LILPLLFYLRKRNKTGKHDVQVLTAKPRNGLAGDTETFRKVEPGQAIPLTAVPGQGPPPGGQPDP |
| | | | | ELLQFCRTPNPALKNGQYWV |
| 250. | c-terminal | human | nt | ATGGGATGGAGCTGTATCATCCTCTTCTTGGTAGCAACAGCTACAGGTGTACACTCCGACTACAA |
| | domain | | | AGACGATGACGACAAGTCCCGTACGAGATCTGGATCCCAATTGGACGGCGGGCTCGTGCTGTTCT |
| | construct of | | | CACACAGAGGAACCCTGGATGGAGGCTTCCGCTTCCGCCTCTCTGACGGCGAGCACACTTCCCCC |
| | human MCSP | | | GGACACTTCTTCCGAGTGACGGCCCAGAAGCAAGTGCTCCTCTCGCTGAAGGGCAGCCAGACACT |
| | | | | GACTGTCTGCCCAGGGTCCGTCCAGCCACTCAGCAGTCAGACCCTCAGGGCCAGCTCCAGCGCAG |
| | | | | GCACTGACCCCCAGCTCCTGCTCTACCGTGTGGTGCGGGGCCCCCAGCTAGGCCGGCTGTTCCAC |
| | | | | GCCCAGCAGGACAGCACAGGGGAGGCCCTGGTGAACTTCACTCAGGCAGAGGTCTACGCTGGGAA |
| | | | | TATTCTGTATGAGCATGAGATGCCCCCCGAGCCCTTTTGGGAGGCCCATGATACCCTAGAGCTCC |
| | | | | AGCTGTCCTCGCCGCCTGCCCGGGACGTGGCCGCCACCCTTGCTGTGGCTGTGTCTTTTGAGGCT |
| | | | | GCCTGTCCCCAGCGCCCCAGCCACCTCTGGAAGAACAAAGGTCTCTGGGTCCCCGAGGGCCAGCG |
| | | | | GGCCAGGATCACCGTGGCTGCTCTGGATGCCTCCAATCTCTTGGCCAGCGTTCCATCACCCCAGC |
| | | | | GCTCAGAGCATGATGTGCTCTTCCAGGTCACACAGTTCCCCAGCCGCGGCCAGCTGTTGGTGTCC |
| | | | | GAGGAGCCCCTCCATGCTGGGCAGCCCCACTTCCTGCAGTCCCAGCTGGCTGCAGGGCAGCTAGT |
| | | | | GTATGCCCACGGCGGTGGGGGCACCCAGCAGGATGGCTTCCACTTTCGTGCCCACCTCCAGGGGC |
| | | | | CAGCAGGGGCCTCCGTGGCTGGACCCCAAACCTCAGAGGCCTTTGCCATCACGGTGAGGGATGTA |
| | | | | AATGAGCGGCCCCCTCAGCCACAGGCCTCTGTCCCACTCCGGCTCACCCGAGGCTCTCGTGCCCC |
| | | | | CATCTCCCGGGCCCAGCTGAGTGTGGTGGACCCAGACTCAGCTCCTGGGGAGATTGAGTACGAGG |
| | | | | TCCAGCGGGCACCCCACAACGGCTTCCTCAGCCTGGTGGGTGGTGGCCTGGGGCCCGTGACCCGC |
| | | | | TTCACGCAAGCCGATGTGGATTCAGGGCGGCTGGCCTTCGTGGCCAACGGGAGCAGCGTGGCAGG |
| | | | | CATCTTCCAGCTGAGCATGTCTGATGGGGCCAGCCCACCCCTGCCCATGTCCCTGGCTGTGGACA |
| | | | | TCCTACCATCCGCCATCGAGGTGCAGCTGCGGGCACCCCTGGAGGTGCCCCAAGCTTTGGGGCGC |
| | | | | TCCTCACTGAGCCAGCAGCAGCTCCGGGTGGTTTCAGATCGGGAGGAGCCAGAGGCAGCATACCG |
| | | | | GTTGATCCAGGGACCCCAGTATGGGCATCTCCTGGTGGGCGGGCGGCCCACCTCGGCCTTCAGCC |
| | | | | AATTCCAGATAGACCAGGGCGAGGTGGTCTTTGCCTTCACCAACTCCTCCTCCTCTCATGACCAC |
| | | | | TTCAGAGTCCTGGCACTGGCTAGGGGTGTCAATGCATCAGCCGTAGTGAACGTCACTGTGAGGGC |
| | | | | TCTGCTGCATGTGTGGGCAGGTGGGCCATGGCCCCAGGGTGCCACCCTGCGCCTGGACCCCACCG |
| | | | | TCCTAGATGCTGGCGAGCTGGCCAACCGCACAGACAGTGTGCCGCGCTTCCGCCTCCTGGAGGGA |
| | | | | CCCCGGCATGGCCGCGTGGTCCGCGTGCCCCGAGCCAGGACGGAGCCCGGGGGCAGCCAGCTGGT |
| | | | | GGAGCAGTTCACTCAGCAGGACCTTGAGGACGGGAGGCTGGGGCTGGAGGTGGGCAGGCCAGAGG |
| | | | | GGAGGGCCCCCGGCCCCGCAGGTGACAGTCTCACTCTGGAGCTGTGGGCACAGGGCGTCCCGCCT |
| | | | | GCTGTGGCCTCCCTGGACTTTGCCACTGAGCCTTACAATGCTGCCCGGCCCTACAGCGTGGCCCT |
| | | | | GCTCAGTGTCCCCGAGGCCGCCCGGACGGAAGCAGGGAAGCCAGAGAGCAGCACCCCCACAGGCG |
| | | | | AGCCAGGCCCCATGGCATCCAGCCCTGAGCCCGCTGTGGCCAAGGGAGGCTTCCTGAGCTTTCTA |
| | | | | GAGGCCAACATGTTCAGCGTCATCATCCCCATGTGCCTGGTACTTCTGCTCCTGGCGCTCATCCT |
| | | | | GCCCCTGCTCTTCTACCTCCGAAAACGCAACAAGACGGGCAAGCATGACGTCCAGGTCCTGACTG |
| | | | | CCAAGCCCCGCAACGGCCTGGCTGGTGACACCGAGACCTTTCGCAAGGTGGAGCCAGGCCAGGCC |
| | | | | ATCCCGCTCACAGCTGTGCCTGGCCAGGGGCCCCCTCCAGGAGGCCAGCCTGACCCAGAGCTGCT |
| | | | | GCAGTTCTGCCGGACACCCAACCCTGCCCTTAAGAATGGCCAGTACTGGGTG |
| 251. | partial | cynomolgus | aa | PSNGRVVLRAAPGTEVRSFTQAQLDGGLVLFSHRGTLDGGFRFGLSDGEHTSSGHFFRVTAQKQV |
| | sequence of | | | LLSLEGSRTLTVCPGSVQPLSSQTLRASSSAGTDPQLLLYRVVRGPQLGRLFHAQQDSTGEALVN |
| | cynomolgus | | | FTQAEVYAGNILYEHEMPTEPFWEAHDTLELQLSSPPARDVAATLAVAVSFEAACPQRPSHLWKN |
| | MCSP | | | KGLWVPEGQRAKITMAALDASNLLASVPSSQRLEHDVLFQVTQFPSRGQLLVSEEPLHAGQPHFL |
| | | | | QSQLAAGQLVYAHGGGGTQQDGFHFRAHLQGPAGATVAGPQTSEAFAITVRDVNERPPQPQASVP |
| | | | | LRITRGSRAPISRAQLSVVDPDSAPGEIEYEVQRAPHNGFLSLVGGGPGPVNRFTQADVDSGRLA |
| | | | | FVANGSSVAGVFQLSMSDGASPPLPMSLAVDILPSAIEVQLQAPLEVPQALGRSSLSQQQLRVVS |
| | | | | DREEPEAAYRLIQGPKYGHLLVGGQPASAFSQLQIDQGEVVFAFTNFSSSHDHFRVLALARGVNA |
| | | | | SAVVNITVRALLHVWAGGPWPQGATLRLDPTILDAGELANRTGSVPRFRLLEGPRHGRVVRVPRA |
| | | | | RMEPGGSQLVEQFTQQDLEDGRLGLEVGRPEGRAPSPTGDSLTLELWAQGVPPAVASLDFATEPY |
| | | | | NAARPYSVALLSVPEATRTEAGKPESSTPTGEPGPMASSPVPAVAKGGFLGFLEANMFSVIIPXC |
| | | | | LVLLLLALILPLLFYLRKRNKTGKHDVQVLTAKPRNGLAGDTETFRKVEPGQAIPLTAVPGQGPP |
| | | | | PGGQPDPELLQFCRTPNPALKNGQYWV |
| 252. | partial | cynomolgus | nt | CCCAGCAACGGACGGGTAGTGCTGCGGGCGGCGCCGGGCACCGAGGTGCGCAGCTTCACGCAGGC |
| | sequence of | | | CCAGCTGGATGGCGGACTCGTGCTGTTCTCACACAGAGGAACCCTGGATGGAGGCTTCCGCTTCG |
| | cynomolgus | | | GCCTCTCCGATGGCGAGCACACTTCCTCTGGACACTTCTTCCGAGTGACGGCCCAGAAGCAAGTG |
| | MCSP | | | CTCCTCTCGCTGGAGGGCAGCCGGACACTGACTGTCTGCCCAGGGTCCGTGCAGCCACTCAGCAG |
| | | | | TCAGACCCTCAGAGCCAGCTCCAGCGCAGGCACCGACCCCCAGCTCCTGCTCTACCGTGTGGTGC |
| | | | | GGGGCCCCCAGCTAGGCCGGCTGTTCCATGCCCAGCAGGACAGCACAGGGGAGGCCCTGGTGAAC |
| | | | | TTCACTCAGGCAGAGGTCTATGCTGGGAATATTCTGTATGAGCATGAGATGCCCACCGAGCCCTT |
| | | | | CTGGGAGGCCCATGATACCCTAGAGCTCCAGCTGTCCTCACCACCTGCCCGGGACGTGGCTGCCA |
| | | | | CCCTTGCTGTGGCTGTGTCTTTTGAGGCTGCCTGTCCCCAGCGCCCCAGCCACCTCTGGAAGAAC |
| | | | | AAAGGTCTCTGGGTCCCCGAGGGCCAGCGGGCCAAGATCACCATGGCTGCCCTGGATGCCTCCAA |
| | | | | CCTCTTGGCCAGCGTTCCATCATCCCAGCGCCTAGAGCATGATGTGCTCTTCCAGGTCACGCAGT |
| | | | | TCCCCAGCCGGGGCCAGCTATTGGTGTCTGAGGAGCCCCTCCACGCTGGGCAGCCCCACTTCCTG |
| | | | | CAGTCCCAGCTGGCTGCAGGGCAGCTAGTGTATGCCCACGGCGGTGGGGGTACCCAACAGGATGG |
| | | | | CTTCCACTTTCGTGCCCACCTCCAGGGGCCAGCAGGGGCCACCGTGGCTGGACCCCAAACCTCAG |
| | | | | AGGCTTTTGCCATCACGGTGCGGGATGTAAATGAGCGGCCCCCTCAGCCACAGGCCTCTGTCCCA |
| | | | | CTCCGGATCACCCGAGGCTCTCGAGCCCCCATCTCCCGGGCCCAGCTGAGTGTCGTGGACCCAGA |
| | | | | CTCAGCTCCTGGGGAGATTGAGTATGAGGTCCAGCGGGCACCCCACAACGGCTTCCTCAGCCTGG |
| | | | | TGGGTGGTGGCCCGGGGCCCGTGAACCGCTTCACGCAAGCCGATGTGGATTCGGGGCGGCTGGCC |
| | | | | TTCGTGGCCAACGGGAGCAGCGTAGCAGGCGTCTTCCAGCTGAGCATGTCTGATGGGGCCAGCCC |
| | | | | ACCGCTGCCCATGTCCCTGGCCGTGGACATCCTACCATCCGCCATCGAGGTGCAGCTGCAGGCAC |
| | | | | CCCTGGAGGTGCCCCAAGCTTTGGGGCGCTCCTCACTGAGCCAGCAGCAGCTCCGGGTGGTTTCA |
| | | | | GATAGGGAGGAGCCAGAGGCAGCATACCGCCTCATCCAGGGACCAAAGTACGGGCATCTCCTGGT |
| | | | | GGGTGGGCAGCCCGCCTCGGCCTTCAGCCAACTCCAGATAGACCAGGGCGAGGTGGTCTTTGCCT |
| | | | | TCACCAACTTCTCCTCCTCTCATGACCACTTCAGAGTCCTGGCACTGGCTAGGGGTGTCAACGCA |
| | | | | TCAGCCGTAGTGAACATCACTGTGAGGGCTCTGCTGCACGTGTGGGCAGGTGGGCCATGGCCCCA |
| | | | | GGGTGCTACCCTGCGCCTGGACCCAACCATCCTAGATGCTGGCGAGCTGGCCAACCGCACAGGCA |
| | | | | GTGTGCCCCGCTTCCGCCTCCTGGAGGGACCCCGGCATGGCCGCGTGGTCCGTGTGCCCCGAGCC |
| | | | | AGGATGGAGCCTGGGGGCAGCCAGCTGGTGGAGCAGTTCACTCAGCAGGACCTTGAGGATGGGAG |
| | | | | GCTGGGGCTGGAGGTGGGCAGGCCAGAGGGAAGGGCCCCCAGCCCCACAGGCGACAGTCTCACTC |
| | | | | TGGAGCTGTGGGCACAGGGCGTCCCACCTGCTGTGGCCTCCCTGGACTTTGCCACTGAGCCTTAC |
| | | | | AATGCTGCCCGGCCCTACAGCGTGGCCCTGCTCAGTGTCCCCGAGGCCACCCGGACGGAAGCAGG |
| | | | | GAAGCCAGAGAGCAGCACCCCCACAGGCGAGCCAGGCCCCATGGCATCTAGCCCTGTGCCTGCTG |
| | | | | TGGCCAAGGGAGGCTTCCTGGGCTTCCTTGAGGCCAACATGTTCAGTGTCATCATCCCCRTGTGC |
| | | | | CTGGTCCTTCTGCTCCTGGCGCTCATCTTGCCCCTGCTCTTCTACCTCCGAAAACGCAACAAGAC |
| | | | | GGGCAAGCATGACGTCCAGGTCCTGACTGCCAAGCCCCGCAATGGTCTGGCTGGTGACACTGAGA |
| | | | | CCTTTCGCAAGGTGGAGCCAGGCCAGGCCATCCCGCTCACAGCTGTGCCTGGCCAGGGGCCCCCT |
| | | | | CCGGGAGGCCAGCCTGACCCAGAGCTGCTGCAGTTCTGCCGGACACCCAACCCTGCCCTTAAGAA |
| | | | | TGGCCAGTACTGGGTG |
| 253. | PCR primer | artificial | nt | AGAGTTCTGGGCCTCTGC |
| | for CD3ε | | | |
| | chain - | | | |
| | forward | | | |
| | primer | | | |
| 254. | PCR primer | artificial | nt | CGGATGGGCTCATAGTCTG |
| | for CD3ε | | | |
| | chain - | | | |
| | reverse | | | |
| | primer | | | |
| 255. | His6-human | artificial | aa | HHHHHHQDGNEEMGGITQTPYKVSISGTTVILTCPQYPGSEILWQHNDKNIGGDEDDKNIGSDED |
| | CD3ε | | | HLSLKEFSELEQSGYYVCYPRGSKPEDANFYLYLRARVCENCMEMDVMSVATIVIVDICITGGLL |
| | | | | LLVYYWSKNRKAKAKPVTRGAGAGGRQRGQNKERPPPVPNPDYEPIRKGQRDLYSGLNQRRI |
| 256. | His6-human | artificial | nt | ATGGGATGGAGCTGTATCATCCTCTTCTTGGTAGCAACAGCTACAGGTGTACACTCCCATCATCA |
| | CD3ε | | | CCATCATCATCAAGATGGTAATGAAGAAATGGGTGGTATTACACAGACACCATATAAAGTCTCCA |
| | | | | TCTCTGGAACCACAGTAATATTGACATGCCCTCAGTATCCTGGATCTGAAATACTATGGCAACAC |
| | | | | AATGATAAAAACATAGGCGGTGATGAGGATGATAAAAACATAGGCAGTGATGAGGATCACCTGTC |
| | | | | ACTGAAGGAATTTTCAGAATTGGAGCAAAGTGGTTATTATGTCTGCTACCCCAGAGGAAGCAAAC |
| | | | | CAGAAGATGCGAACTTTTATCTCTACCTGAGGGCACGCGTGTGTGAGAACTGCATGGAGATGGAT |
| | | | | GTGATGTCGGTGGCCACAATTGTCATAGTGGACATCTGCATCACTGGGGGCTTGCTGCTGCTGGT |
| | | | | TTACTACTGGAGCAAGAATAGAAAGGCCAAGGCCAAGCCTGTGACACGAGGAGCGGGTGCTGGCG |
| | | | | GCAGGCAAAGGGGACAAAACAAGGAGAGGCCACCACCTGTTCCCAACCCAGACTATGAGCCCATC |
| | | | | CGGAAAGGCCAGCGGGACCTGTATTCTGGCCTGAATCAGAGACGCATC |
| 257. | CD33 AH3 HL x | artificial | aa | QVQLVQSGAEVKKPGESVKVSCKASGYTFTNYGMNWVRQAPGQGLEWMGWINTYTGEPTYADDFK |
| | H2C HL | | | GRVTMSSDTSTSTAYLEINSLRSDDTAIYYCARWSWSDGYYVYFDYWGQGTTVTVSSggggsggg |
| | | | | gsggggsDIVMTQSPDSLTVSLGERTTINCKSSQSVLDSSKNKNSLAWYQQKPGQPPKLLLSWAS |
| | | | | TRESGIPDRFSGSGSGTDFTLTIDSLQPEDSATYYCQQSAHFPITFGQGTRLEIKSGGGGSEVQL |
| | | | | VESGGGLVQPGGSLKLSCAASGFTFNKYAMNWVRQAPGKGLEWVARIRSKYNNYATYYADSVKDR |
| | | | | FTISRDDSKNTAYLQMNNLKTEDTAVYYCVRHGNFGNSYISYWAYWGQGTLVTVSSGGGGSGGGG |
| | | | | SGGGGSQTVVTQEPSLTVSPGGTVTLTCGSSTGAVTSGYYPNWVQQKPGQAPRGLIGGTKFLAPG |
| | | | | TPARFSGSLLGGKAALTLSGVQPEDEAEYYCALWYSNRWVFGGGTKLTVL |
| 258. | CD33 AH3 HL x | artificial | nt | CAGGTGCAGCTGGTGCAGTCTGGAGCTGAGGTGAAAAAGCCTGGAGAGTCAGTCAAGGTCTCCTG |
| | H2C HL | | | CAAGGCTAGCGGGTATACCTTCACAAACTATGGAATGAACTGGGTGAGGCAGGCTCCAGGACAGG |
| | | | | GTTTAGAGTGGATGGGCTGGATAAACACCTACACTGGAGAGCCAACATATGCTGATGACTTCAAG |
| | | | | GGACGGGTTACCATGTCTTCGGATACCTCTACCAGCACTGCCTATTTGGAAATCAACAGCCTCAG |
| | | | | AAGTGATGACACGGCTATATATTACTGTGCGCGCTGGAGTTGGAGTGATGGTTACTACGTTTACT |
| | | | | TTGACTACTGGGGCCAAGGCACTACGGTCACCGTCTCCTCAGGTGGTGGTGGTTCTGGCGGCGGC |
| | | | | GGCTCCGGTGGTGGTGGTTCTGACATCGTGATGACACAGTCTCCAGACTCCCTGACTGTGTCTCT |
| | | | | GGGCGAGAGGACCACCATCAACTGCAAGTCCAGCCAGAGTGTTTTAGACAGCTCCAAGAATAAGA |
| | | | | ACTCCTTAGCTTGGTACCAGCAGAAACCAGGACAGCCTCCTAAATTACTCCTTTCCTGGGCATCT |
| | | | | ACGCGGGAATCCGGGATCCCTGACCGATTCAGTGGCAGCGGGTCTGGGACAGATTTCACTCTCAC |
| | | | | TATTGACAGCCTGCAGCCTGAAGATTCTGCAACTTACTATTGTCAACAGTCTGCCCACTTCCCGA |
| | | | | TCACCTTTGGCCAAGGGACACGACTGGAGATTAAATCCGGAGGTGGTGGCTCCGAGGTGCAGCTG |
| | | | | GTCGAGTCTGGAGGAGGATTGGTGCAGCCTGGAGGGTCATTGAAACTCTCATGTGCAGCCTCTGG |
| | | | | ATTCACCTTCAATAAGTACGCCATGAACTGGGTCCGCCAGGCTCCAGGAAAGGGTTTGGAATGGG |
| | | | | TTGCTCGCATAAGAAGTAAATATAATAATTATGCAACATATTATGCCGATTCAGTGAAAGACAGG |
| | | | | TTCACCATCTCCAGAGATGATTCAAAAAACACTGCCTATCTACAAATGAACAACTTGAAAACTGA |
| | | | | GGACACTGCCGTGTACTACTGTGTGAGACATGGGAACTTCGGTAATAGCTACATATCCTACTGGG |
| | | | | CTTACTGGGGCCAAGGGACTCTGGTCACCGTCTCCTCAGGTGGTGGTGGTTCTGGCGGCGGCGGC |
| | | | | TCCGGTGGTGGTGGTTCTCAGACTGTTGTGACTCAGGAACCTTCACTCACCGTATCACCTGGTGG |
| | | | | AACAGTCACACTCACTTGTGGCTCCTCGACTGGGGCTGTTACATCTGGCTACTACCCAAACTGGG |
| | | | | TCCAACAAAAACCAGGTCAGGCACCCCGTGGTCTAATAGGTGGGACTAAGTTCCTCGCCCCCGGT |
| | | | | ACTCCTGCCAGATTCTCAGGCTCCCTGCTTGGAGGCAAGGCTGCCCTCACCCTCTCAGGGGTACA |
| | | | | GCCAGAGGATGAGGCAGAATATTACTGTGCTCTATGGTACAGCAACCGCTGGGTGTTCGGTGGAG |
| | | | | GAACCAAACTGACTGTCCTA |
| 259. | CD33 AH3 HL x | artificial | aa | QVQLVQSGAEVKKPGESVKVSCKASGYTFTNYGMNWVRQAPGQGLEWMGWINTYTGEPTYADDFK |
| | F12Q HL | | | GRVTMSSDTSTSTAYLEINSLRSDDTAIYYCARWSWSDGYYVYFDYWGQGTTVTVSSggggsggg |
| | | | | gsggggsDIVMTQSPDSLTVSLGERTTINCKSSQSVLDSSKNKNSLAWYQQKPGQPPKLLLSWAS |
| | | | | TRESGIPDRFSGSGSGTDFTLTIDSLQPEDSATYYCQQSAHFPITFGQGTRLEIKSGGGGSEVQL |
| | | | | VESGGGLVQPGGSLKLSCAASGFTFNSYAMNWVRQAPGKGLEWVARIRSKYNNYATYYADSVKGR |
| | | | | FTISRDDSKNTAYLQMNNLKTEDTAVYYCVRHGNFGNSYVSWWAYWGQGTLVTVSSGGGGSGGGG |
| | | | | SGGGGSQTVVTQEPSLTVSPGGTVTLTCGSSTGAVTSGNYPNWVQQKPGQAPRGLIGGTKFLAPG |
| | | | | TPARFSGSLLGGKAALTLSGVQPEDEAEYYCVLWYSNRWVFGGGTKLTVL |
| 260. | CD33 AH3 HL x | artificial | nt | CAGGTGCAGCTGGTGCAGTCTGGAGCTGAGGTGAAAAAGCCTGGAGAGTCAGTCAAGGTCTCCTG |
| | F12Q HL | | | CAAGGCTAGCGGGTATACCTTCACAAACTATGGAATGAACTGGGTGAGGCAGGCTCCAGGACAGG |
| | | | | GTTTAGAGTGGATGGGCTGGATAAACACCTACACTGGAGAGCCAACATATGCTGATGACTTCAAG |
| | | | | GGACGGGTTACCATGTCTTCGGATACCTCTACCAGCACTGCCTATTTGGAAATCAACAGCCTCAG |
| | | | | AAGTGATGACACGGCTATATATTACTGTGCGCGCTGGAGTTGGAGTGATGGTTACTACGTTTACT |
| | | | | TTGACTACTGGGGCCAAGGCACTACGGTCACCGTCTCCTCAGGTGGTGGTGGTTCTGGCGGCGGC |
| | | | | GGCTCCGGTGGTGGTGGTTCTGACATCGTGATGACACAGTCTCCAGACTCCCTGACTGTGTCTCT |
| | | | | GGGCGAGAGGACCACCATCAACTGCAAGTCCAGCCAGAGTGTTTTAGACAGCTCCAAGAATAAGA |
| | | | | ACTCCTTAGCTTGGTACCAGCAGAAACCAGGACAGCCTCCTAAATTACTCCTTTCCTGGGCATCT |
| | | | | ACGCGGGAATCCGGGATCCCTGACCGATTCAGTGGCAGCGGGTCTGGGACAGATTTCACTCTCAC |
| | | | | TATTGACAGCCTGCAGCCTGAAGATTCTGCAACTTACTATTGTCAACAGTCTGCCCACTTCCCGA |
| | | | | TCACCTTTGGCCAAGGGACACGACTGGAGATTAAATCCGGAGGTGGTGGCTCCGAGGTGCAGCTG |
| | | | | GTCGAGTCTGGAGGAGGATTGGTGCAGCCTGGAGGGTCATTGAAACTCTCATGTGCAGCCTCTGG |
| | | | | ATTCACCTTCAATAGCTACGCCATGAACTGGGTCCGCCAGGCTCCAGGAAAGGGTTTGGAATGGG |
| | | | | TTGCTCGCATAAGAAGTAAATATAATAATTATGCAACATATTATGCCGATTCAGTGAAAGGCAGG |
| | | | | TTCACCATCTCCAGAGATGATTCAAAAAACACTGCCTATCTACAAATGAACAACTTGAAAACTGA |
| | | | | GGACACTGCCGTGTACTACTGTGTGAGACATGGGAACTTCGGTAATAGCTACGTTTCCTGGTGGG |
| | | | | CTTACTGGGGCCAAGGGACTCTGGTCACCGTCTCCTCAGGTGGTGGTGGTTCTGGCGGCGGCGGC |
| | | | | TCCGGTGGTGGTGGTTCTCAGACTGTTGTGACTCAGGAACCTTCACTCACCGTATCACCTGGTGG |
| | | | | AACAGTCACACTCACTTGTGGCTCCTCGACTGGGGCTGTTACATCTGGCAACTACCCAAACTGGG |
| | | | | TCCAACAAAAACCAGGTCAGGCACCCCGTGGTCTAATAGGTGGGACTAAGTTCCTCGCCCCCGGT |
| | | | | ACTCCTGCCAGATTCTCAGGCTCCCTGCTTGGAGGCAAGGCTGCCCTCACCCTCTCAGGGGTACA |
| | | | | GCCAGAGGATGAGGCAGAATATTACTGTGTTCTATGGTACAGCAACCGCTGGGTGTTCGGTGGAG |
| | | | | GAACCAAACTGACTGTCCTA |
| 261. | CD33 AH3 HL x | artificial | aa | QVQLVQSGAEVKKPGESVKVSCKASGYTFTNYGMNWVRQAPGQGLEWMGWINTYTGEPTYADDFK |
| | I2C HL | | | GRVTMSSDTSTSTAYLEINSLRSDDTAIYYCARWSWSDGYYVYFDYWGQGTTVTVSSggggsggg |
| | | | | gsggggsDIVMTQSPDSLTVSLGERTTINCKSSQSVLDSSKNKNSLAWYQQKPGQPPKLLLSWAS |
| | | | | TRESGIPDRFSGSGSGTDFTLTIDSLQPEDSATYYCQQSAHFPITFGQGTRLEIKSGGGGSEVQL |
| | | | | VESGGGLVQPGGSLKLSCAASGFTFNKYAMNWVRQAPGKGLEWVARIRSKYNNYATYYADSVKDR |
| | | | | FTISRDDSKNTAYLQMNNLKTEDTAVYYCVRHGNFGNSYISYWAYWGQGTLVTVSSGGGGSGGGG |
| | | | | SGGGGSQTVVTQEPSLTVSPGGTVTLTCGSSTGAVTSGNYPNWVQQKPGQAPRGLIGGTKFLAPG |
| | | | | TPARFSGSLLGGKAALTLSGVQPEDEAEYYCVLWYSNRWVFGGGTKLTVL |
| 262. | CD33 AH3 HL x | artificial | nt | CAGGTGCAGCTGGTGCAGTCTGGAGCTGAGGTGAAAAAGCCTGGAGAGTCAGTCAAGGTCTCCTG |
| | I2C HL | | | CAAGGCTAGCGGGTATACCTTCACAAACTATGGAATGAACTGGGTGAGGCAGGCTCCAGGACAGG |
| | | | | GTTTAGAGTGGATGGGCTGGATAAACACCTACACTGGAGAGCCAACATATGCTGATGACTTCAAG |
| | | | | GGACGGGTTACCATGTCTTCGGATACCTCTACCAGCACTGCCTATTTGGAAATCAACAGCCTCAG |
| | | | | AAGTGATGACACGGCTATATATTACTGTGCGCGCTGGAGTTGGAGTGATGGTTACTACGTTTACT |
| | | | | TTGACTACTGGGGCCAAGGCACTACGGTCACCGTCTCCTCAGGTGGTGGTGGTTCTGGCGGCGGC |
| | | | | GGCTCCGGTGGTGGTGGTTCTGACATCGTGATGACACAGTCTCCAGACTCCCTGACTGTGTCTCT |
| | | | | GGGCGAGAGGACCACCATCAACTGCAAGTCCAGCCAGAGTGTTTTAGACAGCTCCAAGAATAAGA |
| | | | | ACTCCTTAGCTTGGTACCAGCAGAAACCAGGACAGCCTCCTAAATTACTCCTTTCCTGGGCATCT |
| | | | | ACGCGGGAATCCGGGATCCCTGACCGATTCAGTGGCAGCGGGTCTGGGACAGATTTCACTCTCAC |
| | | | | TATTGACAGCCTGCAGCCTGAAGATTCTGCAACTTACTATTGTCAACAGTCTGCCCACTTCCCGA |
| | | | | TCACCTTTGGCCAAGGGACACGACTGGAGATTAAATCCGGAGGTGGTGGCTCCGAGGTGCAGCTG |
| | | | | GTCGAGTCTGGAGGAGGATTGGTGCAGCCTGGAGGGTCATTGAAACTCTCATGTGCAGCCTCTGG |
| | | | | ATTCACCTTCAATAAGTACGCCATGAACTGGGTCCGCCAGGCTCCAGGAAAGGGTTTGGAATGGG |
| | | | | TTGCTCGCATAAGAAGTAAATATAATAATTATGCAACATATTATGCCGATTCAGTGAAAGACAGG |
| | | | | TTCACCATCTCCAGAGATGATTCAAAAAACACTGCCTATCTACAAATGAACAACTTGAAAACTGA |
| | | | | GGACACTGCCGTGTACTACTGTGTGAGACATGGGAACTTCGGTAATAGCTACATATCCTACTGGG |
| | | | | CTTACTGGGGCCAAGGGACTCTGGTCACCGTCTCCTCAGGTGGTGGTGGTTCTGGCGGCGGCGGC |
| | | | | TCCGGTGGTGGTGGTTCTCAGACTGTTGTGACTCAGGAACCTTCACTCACCGTATCACCTGGTGG |
| | | | | AACAGTCACACTCACTTGTGGCTCCTCGACTGGGGCTGTTACATCTGGCAACTACCCAAACTGGG |
| | | | | TCCAACAAAAACCAGGTCAGGCACCCCGTGGTCTAATAGGTGGGACTAAGTTCCTCGCCCCCGGT |
| | | | | ACTCCTGCCAGATTCTCAGGCTCCCTGCTTGGAGGCAAGGCTGCCCTCACCCTCTCAGGGGTACA |
| | | | | GCCAGAGGATGAGGCAGAATATTACTGTGTTCTATGGTACAGCAACCGCTGGGTGTTCGGTGGAG |
| | | | | GAACCAAACTGACTGTCCTA |
| 263. | CD33 AF5 HL x | artificial | aa | QVQLVQSGAEVKKPGASVKVSCKASGYTFTNYGMNWVKQAPGQGLKWMGWINTYTGEPTYADDFK |
| | H2C HL | | | GRVTMTSDTSTSTAYLELHNLRSDDTAVYYCARWSWSDGYYVYFDYWGQGTTVTVSSggggsggg |
| | | | | gsggggsDIVMTQSPDSLTVSLGERTTINCKSSQSVLDSSKNKNSLAWYQQKPGQPPKLLLSWAS |
| | | | | TRESGIPDRFSGSGSGTDFTLTIDSLQPEDSATYYCQQSAHFPITFGQGTRLEIKSGGGGSEVQL |
| | | | | VESGGGLVQPGGSLKLSCAASGFTFNKYAMNWVRQAPGKGLEWVARIRSKYNNYATYYADSVKDR |
| | | | | FTISRDDSKNTAYLQMNNLKTEDTAVYYCVRHGNFGNSYISYWAYWGQGTLVTVSSGGGGSGGGG |
| | | | | SGGGGSQTVVTQEPSLTVSPGGTVTLTCGSSTGAVTSGYYPNWVQQKPGQAPRGLIGGTKFLAPG |
| | | | | TPARFSGSLLGGKAALTLSGVQPEDEAEYYCALWYSNRWVFGGGTKLTVL |
| 264. | CD33 AF5 HL x | artificial | nt | CAGGTGCAGCTGGTGCAGTCTGGAGCTGAGGTGAAGAAGCCTGGAGCGTCAGTCAAGGTCTCCTG |
| | H2C HL | | | CAAGGCTAGCGGGTATACCTTCACAAACTATGGAATGAACTGGGTGAAGCAGGCTCCAGGACAGG |
| | | | | GTTTAAAGTGGATGGGCTGGATAAACACCTACACTGGAGAGCCAACATATGCTGATGACTTCAAG |
| | | | | GGACGGGTTACCATGACTTCGGATACCTCTACCAGCACTGCCTATTTGGAACTCCACAACCTCAG |
| | | | | AAGTGATGACACGGCTGTATATTACTGTGCGCGCTGGAGTTGGAGTGATGGTTACTACGTTTACT |
| | | | | TTGACTACTGGGGCCAAGGCACTACGGTCACCGTCTCCTCAGGTGGTGGTGGTTCTGGCGGCGGC |
| | | | | GGCTCCGGTGGTGGTGGTTCTGACATCGTGATGACACAGTCTCCAGACTCCCTGACTGTGTCTCT |
| | | | | GGGCGAGAGGACCACCATCAACTGCAAGTCCAGCCAGAGTGTTTTAGACAGCTCCAAGAATAAGA |
| | | | | ACTCCTTAGCTTGGTACCAGCAGAAACCAGGACAGCCTCCTAAATTACTCCTTTCCTGGGCATCT |
| | | | | ACGCGGGAATCCGGGATCCCTGACCGATTCAGTGGCAGCGGGTCTGGGACAGATTTCACTCTCAC |
| | | | | TATTGACAGCCTGCAGCCTGAAGATTCTGCAACTTACTATTGTCAACAGTCTGCCCACTTCCCGA |
| | | | | TCACCTTTGGCCAAGGGACACGACTGGAGATTAAATCCGGAGGTGGTGGCTCCGAGGTGCAGCTG |
| | | | | GTCGAGTCTGGAGGAGGATTGGTGCAGCCTGGAGGGTCATTGAAACTCTCATGTGCAGCCTCTGG |
| | | | | ATTCACCTTCAATAAGTACGCCATGAACTGGGTCCGCCAGGCTCCAGGAAAGGGTTTGGAATGGG |
| | | | | TTGCTCGCATAAGAAGTAAATATAATAATTATGCAACATATTATGCCGATTCAGTGAAAGACAGG |
| | | | | TTCACCATCTCCAGAGATGATTCAAAAAACACTGCCTATCTACAAATGAACAACTTGAAAACTGA |
| | | | | GGACACTGCCGTGTACTACTGTGTGAGACATGGGAACTTCGGTAATAGCTACATATCCTACTGGG |
| | | | | CTTACTGGGGCCAAGGGACTCTGGTCACCGTCTCCTCAGGTGGTGGTGGTTCTGGCGGCGGCGGC |
| | | | | TCCGGTGGTGGTGGTTCTCAGACTGTTGTGACTCAGGAACCTTCACTCACCGTATCACCTGGTGG |
| | | | | AACAGTCACACTCACTTGTGGCTCCTCGACTGGGGCTGTTACATCTGGCTACTACCCAAACTGGG |
| | | | | TCCAACAAAAACCAGGTCAGGCACCCCGTGGTCTAATAGGTGGGACTAAGTTCCTCGCCCCCGGT |
| | | | | ACTCCTGCCAGATTCTCAGGCTCCCTGCTTGGAGGCAAGGCTGCCCTCACCCTCTCAGGGGTACA |
| | | | | GCCAGAGGATGAGGCAGAATATTACTGTGCTCTATGGTACAGCAACCGCTGGGTGTTCGGTGGAG |
| | | | | GAACCAAACTGACTGTCCTA |
| 265. | CD33 AF5 HL x | artificial | aa | QVQLVQSGAEVKKPGASVKVSCKASGYTFTNYGMNWVKQAPGQGLKWMGWINTYTGEPTYADDFK |
| | F12Q HL | | | GRVTMTSDTSTSTAYLELHNLRSDDTAVYYCARWSWSDGYYVYFDYWGQGTTVTVSSggggsggg |
| | | | | gsggggsDIVMTQSPDSLTVSLGERTTINCKSSQSVLDSSKNKNSLAWYQQKPGQPPKLLLSWAS |
| | | | | TRESGIPDRFSGSGSGTDFTLTIDSLQPEDSATYYCQQSAHFPITFGQGTRLEIKSGGGGSEVQL |
| | | | | VESGGGLVQPGGSLKLSCAASGFTFNSYAMNWVRQAPGKGLEWVARIRSKYNNYATYYADSVKGR |
| | | | | FTISRDDSKNTAYLQMNNLKTEDTAVYYCVRHGNFGNSYVSWWAYWGQGTLVTVSSGGGGSGGGG |
| | | | | SGGGGSQTVVTQEPSLTVSPGGTVTLTCGSSTGAVTSGNYPNWVQQKPGQAPRGLIGGTKFLAPG |
| | | | | TPARFSGSLLGGKAALTLSGVQPEDEAEYYCVLWYSNRWVFGGGTKLTVL |
| 266. | CD33 AF5 HL x | artificial | nt | CAGGTGCAGCTGGTGCAGTCTGGAGCTGAGGTGAAGAAGCCTGGAGCGTCAGTCAAGGTCTCCTG |
| | F12Q HL | | | CAAGGCTAGCGGGTATACCTTCACAAACTATGGAATGAACTGGGTGAAGCAGGCTCCAGGACAGG |
| | | | | GTTTAAAGTGGATGGGCTGGATAAACACCTACACTGGAGAGCCAACATATGCTGATGACTTCAAG |
| | | | | GGACGGGTTACCATGACTTCGGATACCTCTACCAGCACTGCCTATTTGGAACTCCACAACCTCAG |
| | | | | AAGTGATGACACGGCTGTATATTACTGTGCGCGCTGGAGTTGGAGTGATGGTTACTACGTTTACT |
| | | | | TTGACTACTGGGGCCAAGGCACTACGGTCACCGTCTCCTCAGGTGGTGGTGGTTCTGGCGGCGGC |
| | | | | GGCTCCGGTGGTGGTGGTTCTGACATCGTGATGACACAGTCTCCAGACTCCCTGACTGTGTCTCT |
| | | | | GGGCGAGAGGACCACCATCAACTGCAAGTCCAGCCAGAGTGTTTTAGACAGCTCCAAGAATAAGA |
| | | | | ACTCCTTAGCTTGGTACCAGCAGAAACCAGGACAGCCTCCTAAATTACTCCTTTCCTGGGCATCT |
| | | | | ACGCGGGAATCCGGGATCCCTGACCGATTCAGTGGCAGCGGGTCTGGGACAGATTTCACTCTCAC |
| | | | | TATTGACAGCCTGCAGCCTGAAGATTCTGCAACTTACTATTGTCAACAGTCTGCCCACTTCCCGA |
| | | | | TCACCTTTGGCCAAGGGACACGACTGGAGATTAAATCCGGAGGTGGTGGCTCCGAGGTGCAGCTG |
| | | | | GTCGAGTCTGGAGGAGGATTGGTGCAGCCTGGAGGGTCATTGAAACTCTCATGTGCAGCCTCTGG |
| | | | | ATTCACCTTCAATAGCTACGCCATGAACTGGGTCCGCCAGGCTCCAGGAAAGGGTTTGGAATGGG |
| | | | | TTGCTCGCATAAGAAGTAAATATAATAATTATGCAACATATTATGCCGATTCAGTGAAAGGCAGG |
| | | | | TTCACCATCTCCAGAGATGATTCAAAAAACACTGCCTATCTACAAATGAACAACTTGAAAACTGA |
| | | | | GGACACTGCCGTGTACTACTGTGTGAGACATGGGAACTTCGGTAATAGCTACGTTTCCTGGTGGG |
| | | | | CTTACTGGGGCCAAGGGACTCTGGTCACCGTCTCCTCAGGTGGTGGTGGTTCTGGCGGCGGCGGC |
| | | | | TCCGGTGGTGGTGGTTCTCAGACTGTTGTGACTCAGGAACCTTCACTCACCGTATCACCTGGTGG |
| | | | | AACAGTCACACTCACTTGTGGCTCCTCGACTGGGGCTGTTACATCTGGCAACTACCCAAACTGGG |
| | | | | TCCAACAAAAACCAGGTCAGGCACCCCGTGGTCTAATAGGTGGGACTAAGTTCCTCGCCCCCGGT |
| | | | | ACTCCTGCCAGATTCTCAGGCTCCCTGCTTGGAGGCAAGGCTGCCCTCACCCTCTCAGGGGTACA |
| | | | | GCCAGAGGATGAGGCAGAATATTACTGTGTTCTATGGTACAGCAACCGCTGGGTGTTCGGTGGAG |
| | | | | GAACCAAACTGACTGTCCTA |
| 267. | CD33 AF5 HL x | artificial | aa | QVQLVQSGAEVKKPGASVKVSCKASGYTFTNYGMNWVKQAPGQGLKWMGWINTYTGEPTYADDFK |
| | I2C HL | | | GRVTMTSDTSTSTAYLELHNLRSDDTAVYYCARWSWSDGYYVYFDYWGQGTTVTVSSggggsggg |
| | | | | gsggggsDIVMTQSPDSLTVSLGERTTINCKSSQSVLDSSKNKNSLAWYQQKPGQPPKLLLSWAS |
| | | | | TRESGIPDRFSGSGSGTDFTLTIDSLQPEDSATYYCQQSAHFPITFGQGTRLEIKSGGGGSEVQL |
| | | | | VESGGGLVQPGGSLKLSCAASGFTFNKYAMNWVRQAPGKGLEWVARIRSKYNNYATYYADSVKDR |
| | | | | FTISRDDSKNTAYLQMNNLKTEDTAVYYCVRHGNFGNSYISYWAYWGQGTLVTVSSGGGGSGGGG |
| | | | | SGGGGSQTVVTQEPSLTVSPGGTVTLTCGSSTGAVTSGNYPNWVQQKPGQAPRGLIGGTKFLAPG |
| | | | | TPARFSGSLLGGKAALTLSGVQPEDEAEYYCVLWYSNRWVFGGGTKLTVL |
| 268. | CD33 AF5 HL x | artificial | nt | CAGGTGCAGCTGGTGCAGTCTGGAGCTGAGGTGAAGAAGCCTGGAGCGTCAGTCAAGGTCTCCTG |
| | I2C HL | | | CAAGGCTAGCGGGTATACCTTCACAAACTATGGAATGAACTGGGTGAAGCAGGCTCCAGGACAGG |
| | | | | GTTTAAAGTGGATGGGCTGGATAAACACCTACACTGGAGAGCCAACATATGCTGATGACTTCAAG |
| | | | | GGACGGGTTACCATGACTTCGGATACCTCTACCAGCACTGCCTATTTGGAACTCCACAACCTCAG |
| | | | | AAGTGATGACACGGCTGTATATTACTGTGCGCGCTGGAGTTGGAGTGATGGTTACTACGTTTACT |
| | | | | TTGACTACTGGGGCCAAGGCACTACGGTCACCGTCTCCTCAGGTGGTGGTGGTTCTGGCGGCGGC |
| | | | | GGCTCCGGTGGTGGTGGTTCTGACATCGTGATGACACAGTCTCCAGACTCCCTGACTGTGTCTCT |
| | | | | GGGCGAGAGGACCACCATCAACTGCAAGTCCAGCCAGAGTGTTTTAGACAGCTCCAAGAATAAGA |
| | | | | ACTCCTTAGCTTGGTACCAGCAGAAACCAGGACAGCCTCCTAAATTACTCCTTTCCTGGGCATCT |
| | | | | ACGCGGGAATCCGGGATCCCTGACCGATTCAGTGGCAGCGGGTCTGGGACAGATTTCACTCTCAC |
| | | | | TATTGACAGCCTGCAGCCTGAAGATTCTGCAACTTACTATTGTCAACAGTCTGCCCACTTCCCGA |
| | | | | TCACCTTTGGCCAAGGGACACGACTGGAGATTAAATCCGGAGGTGGTGGCTCCGAGGTGCAGCTG |
| | | | | GTCGAGTCTGGAGGAGGATTGGTGCAGCCTGGAGGGTCATTGAAACTCTCATGTGCAGCCTCTGG |
| | | | | ATTCACCTTCAATAAGTACGCCATGAACTGGGTCCGCCAGGCTCCAGGAAAGGGTTTGGAATGGG |
| | | | | TTGCTCGCATAAGAAGTAAATATAATAATTATGCAACATATTATGCCGATTCAGTGAAAGACAGG |
| | | | | TTCACCATCTCCAGAGATGATTCAAAAAACACTGCCTATCTACAAATGAACAACTTGAAAACTGA |
| | | | | GGACACTGCCGTGTACTACTGTGTGAGACATGGGAACTTCGGTAATAGCTACATATCCTACTGGG |
| | | | | CTTACTGGGGCCAAGGGACTCTGGTCACCGTCTCCTCAGGTGGTGGTGGTTCTGGCGGCGGCGGC |
| | | | | TCCGGTGGTGGTGGTTCTCAGACTGTTGTGACTCAGGAACCTTCACTCACCGTATCACCTGGTGG |
| | | | | AACAGTCACACTCACTTGTGGCTCCTCGACTGGGGCTGTTACATCTGGCAACTACCCAAACTGGG |
| | | | | TCCAACAAAAACCAGGTCAGGCACCCCGTGGTCTAATAGGTGGGACTAAGTTCCTCGCCCCCGGT |
| | | | | ACTCCTGCCAGATTCTCAGGCTCCCTGCTTGGAGGCAAGGCTGCCCTCACCCTCTCAGGGGTACA |
| | | | | GCCAGAGGATGAGGCAGAATATTACTGTGTTCTATGGTACAGCAACCGCTGGGTGTTCGGTGGAG |
| | | | | GAACCAAACTGACTGTCCTA |
| 269. | CD33 AC8 HL x | artificial | aa | QVQLVQSGAEVKKPGESVKVSCKASGYTFTNYGMNWVKQAPGQGLKWMGWINTYTGEPTYADDFK |
| | H2C HL | | | GRVTMTTDTSTSTAYMEIRNLRNDDTAVYYCARWSWSDGYYVYFDYWGQGTTVTVSSggggsggg |
| | | | | gsggggsDIVMTQSPDSLTVSLGERTTINCKSSQSVLDSSKNKNSLAWYQQKPGQPPKLLLSWAS |
| | | | | TRESGIPDRFSGSGSGTDFTLTIDSLQPEDSATYYCQQSAHFPITFGQGTRLEIKSGGGGSEVQL |
| | | | | VESGGGLVQPGGSLKLSCAASGFTFNKYAMNWVRQAPGKGLEWVARIRSKYNNYATYYADSVKDR |
| | | | | FTISRDDSKNTAYLQMNNLKTEDTAVYYCVRHGNFGNSYISYWAYWGQGTLVTVSSGGGGSGGGG |
| | | | | SGGGGSQTVVTQEPSLTVSPGGTVTLTCGSSTGAVTSGYYPNWVQQKPGQAPRGLIGGTKFLAPG |
| | | | | TPARFSGSLLGGKAALTLSGVQPEDEAEYYCALWYSNRWVFGGGTKLTVL |
| 270. | CD33 AC8 HL x | artificial | nt | CAGGTGCAGCTGGTGCAGTCTGGAGCTGAGGTGAAGAAGCCTGGAGAGTCAGTCAAGGTCTCCTG |
| | H2C HL | | | CAAGGCTAGCGGGTATACCTTCACAAACTATGGAATGAACTGGGTGAAGCAGGCTCCAGGACAGG |
| | | | | GTTTAAAGTGGATGGGCTGGATAAACACCTACACTGGAGAGCCAACATATGCTGATGACTTCAAG |
| | | | | GGACGGGTTACCATGACTACGGATACCTCTACCAGCACTGCCTATATGGAAATCCGCAACCTCAG |
| | | | | AAATGATGACACGGCTGTATATTACTGTGCGCGCTGGAGTTGGAGTGATGGTTACTACGTTTACT |
| | | | | TTGACTACTGGGGCCAAGGCACTACGGTCACCGTCTCCTCAGGTGGTGGTGGTTCTGGCGGCGGC |
| | | | | GGCTCCGGTGGTGGTGGTTCTGACATCGTGATGACACAGTCTCCAGACTCCCTGACTGTGTCTCT |
| | | | | GGGCGAGAGGACCACCATCAACTGCAAGTCCAGCCAGAGTGTTTTAGACAGCTCCAAGAATAAGA |
| | | | | ACTCCTTAGCTTGGTACCAGCAGAAACCAGGACAGCCTCCTAAATTACTCCTTTCCTGGGCATCT |
| | | | | ACGCGGGAATCCGGGATCCCTGACCGATTCAGTGGCAGCGGGTCTGGGACAGATTTCACTCTCAC |
| | | | | TATTGACAGCCTGCAGCCTGAAGATTCTGCAACTTACTATTGTCAACAGTCTGCCCACTTCCCGA |
| | | | | TCACCTTTGGCCAAGGGACACGACTGGAGATTAAATCCGGAGGTGGTGGCTCCGAGGTGCAGCTG |
| | | | | GTCGAGTCTGGAGGAGGATTGGTGCAGCCTGGAGGGTCATTGAAACTCTCATGTGCAGCCTCTGG |
| | | | | ATTCACCTTCAATAAGTACGCCATGAACTGGGTCCGCCAGGCTCCAGGAAAGGGTTTGGAATGGG |
| | | | | TTGCTCGCATAAGAAGTAAATATAATAATTATGCAACATATTATGCCGATTCAGTGAAAGACAGG |
| | | | | TTCACCATCTCCAGAGATGATTCAAAAAACACTGCCTATCTACAAATGAACAACTTGAAAACTGA |
| | | | | GGACACTGCCGTGTACTACTGTGTGAGACATGGGAACTTCGGTAATAGCTACATATCCTACTGGG |
| | | | | CTTACTGGGGCCAAGGGACTCTGGTCACCGTCTCCTCAGGTGGTGGTGGTTCTGGCGGCGGCGGC |
| | | | | TCCGGTGGTGGTGGTTCTCAGACTGTTGTGACTCAGGAACCTTCACTCACCGTATCACCTGGTGG |
| | | | | AACAGTCACACTCACTTGTGGCTCCTCGACTGGGGCTGTTACATCTGGCTACTACCCAAACTGGG |
| | | | | TCCAACAAAAACCAGGTCAGGCACCCCGTGGTCTAATAGGTGGGACTAAGTTCCTCGCCCCCGGT |
| | | | | ACTCCTGCCAGATTCTCAGGCTCCCTGCTTGGAGGCAAGGCTGCCCTCACCCTCTCAGGGCTACA |
| | | | | GCCAGAGGATGAGGCAGAATATTACTGTGCTCTATGGTACAGCAACCGCTGGGTGTTCGGTGGAG |
| | | | | GAACCAAACTGACTGTCCTA |
| 271. | CD33 AC8 HL x | artificial | aa | QVQLVQSGAEVKKPGESVKVSCKASGYTFTNYGMNWVKQAPGQGLKWMGWINTYTGEPTYADDFK |
| | F12Q HL | | | GRVTMTTDTSTSTAYMEIRNLRNDDTAVYYCARWSWSDGYYVYFDYWGQGTTVTVSSggggsggg |
| | | | | gsggggsDIVMTQSPDSLTVSLGERTTINCKSSQSVLDSSKNKNSLAWYQQKPGQPPKLLLSWAS |
| | | | | TRESGIPDRFSGSGSGTDFTLTIDSLQPEDSATYYCQQSAHFPITFGQGTRLEIKSGGGGSEVQL |
| | | | | VESGGGLVQPGGSLKLSCAASGFTFNSYAMNWVRQAPGKGLEWVARIRSKYNNYATYYADSVKGR |
| | | | | FTISRDDSKNTAYLQMNNLKTEDTAVYYCVRHGNFGNSYVSWWAYWGQGTLVTVSSGGGGSGGGG |
| | | | | SGGGGSQTVVTQEPSLTVSPGGTVTLTCGSSTGAVTSGNYPNWVQQKPGQAPRGLIGGTKFLAPG |
| | | | | TPARFSGSLLGGKAALTLSGVQPEDEAEYYCVLWYSNRWVFGGGTKLTVL |
| 272. | CD33 AC8 HL x | artificial | nt | CAGGTGCAGCTGGTGCAGTCTGGAGCTGAGGTGAAGAAGCCTGGAGAGTCAGTCAAGGTCTCCTG |
| | F12Q HL | | | CAAGGCTAGCGGGTATACCTTCACAAACTATGGAATGAACTGGGTGAAGCAGGCTCCAGGACAGG |
| | | | | GTTTAAAGTGGATGGGCTGGATAAACACCTACACTGGAGAGCCAACATATGCTGATGACTTCAAG |
| | | | | GGACGGGTTACCATGACTACGGATACCTCTACCAGCACTGCCTATATGGAAATCCGCAACCTCAG |
| | | | | AAATGATGACACGGCTGTATATTACTGTGCGCGCTGGAGTTGGAGTGATGGTTACTACGTTTACT |
| | | | | TTGACTACTGGGGCCAAGGCACTACGGTCACCGTCTCCTCAGGTGGTGGTGGTTCTGGCGGCGGC |
| | | | | GGCTCCGGTGGTGGTGGTTCTGACATCGTGATGACACAGTCTCCAGACTCCCTGACTGTGTCTCT |
| | | | | GGGCGAGAGGACCACCATCAACTGCAAGTCCAGCCAGAGTGTTTTAGACAGCTCCAAGAATAAGA |
| | | | | ACTCCTTAGCTTGGTACCAGCAGAAACCAGGACAGCCTCCTAAATTACTCCTTTCCTGGGCATCT |
| | | | | ACGCGGGAATCCGGGATCCCTGACCGATTCAGTGGCAGCGGGTCTGGGACAGATTTCACTCTCAC |
| | | | | TATTGACAGCCTGCAGCCTGAAGATTCTGCAACTTACTATTGTCAACAGTCTGCCCACTTCCCGA |
| | | | | TCACCTTTGGCCAAGGGACACGACTGGAGATTAAATCCGGAGGTGGTGGCTCCGAGGTGCAGCTG |
| | | | | GTCGAGTCTGGAGGAGGATTGGTGCAGCCTGGAGGGTCATTGAAACTCTCATGTGCAGCCTCTGG |
| | | | | ATTCACCTTCAATAGCTACGCCATGAACTGGGTCCGCCAGGCTCCAGGAAAGGGTTTGGAATGGG |
| | | | | TTGCTCGCATAAGAAGTAAATATAATAATTATGCAACATATTATGCCGATTCAGTGAAAGGCAGG |
| | | | | TTCACCATCTCCAGAGATGATTCAAAAAACACTGCCTATCTACAAATGAACAACTTGAAAACTGA |
| | | | | GGACACTGCCGTGTACTACTGTGTGAGACATGGGAACTTCGGTAATAGCTACGTTTCCTGGTGGG |
| | | | | CTTACTGGGGCCAAGGGACTCTGGTCACCGTCTCCTCAGGTGGTGGTGGTTCTGGCGGCGGCGGC |
| | | | | TCCGGTGGTGGTGGTTCTCAGACTGTTGTGACTCAGGAACCTTCACTCACCGTATCACCTGGTGG |
| | | | | AACAGTCACACTCACTTGTGGCTCCTCGACTGGGGCTGTTACATCTGGCAACTACCCAAACTGGG |
| | | | | TCCAACAAAAACCAGGTCAGGCACCCCGTGGTCTAATAGGTGGGACTAAGTTCCTCGCCCCCGGT |
| | | | | ACTCCTGCCAGATTCTCAGGCTCCCTGCTTGGAGGCAAGGCTGCCCTCACCCTCTCAGGGGTACA |
| | | | | GCCAGAGGATGAGGCAGAATATTACTGTGTTCTATGGTACAGCAACCGCTGGGTGTTCGGTGGAG |
| | | | | GAACCAAACTGACTGTCCTA |
| 273. | CD33 AC8 HL x | artificial | aa | QVQLVQSGAEVKKPGESVKVSCKASGYTFTNYGMNWVKQAPGQGLKWMGWINTYTGEPTYADDFK |
| | I2C HL | | | GRVTMTTDTSTSTAYMEIRNLRNDDTAVYYCARWSWSDGYYVYFDYWGQGTTVTVSSggggsggg |
| | | | | gsggggsDIVMTQSPDSLTVSLGERTTINCKSSQSVLDSSKNKNSLAWYQQKPGQPPKLLLSWAS |
| | | | | TRESGIPDRFSGSGSGTDFTLTIDSLQPEDSATYYCQQSAHFPITFGQGTRLEIKSGGGGSEVQL |
| | | | | VESGGGLVQPGGSLKLSCAASGFTFNKYAMNWVRQAPGKGLEWVARIRSKYNNYATYYADSVKDR |
| | | | | FTISRDDSKNTAYLQMNNLKTEDTAVYYCVRHGNFGNSYISYWAYWGQGTLVTVSSGGGGSGGGG |
| | | | | SGGGGSQTVVTQEPSLTVSPGGTVTLTCGSSTGAVTSGNYPNWVQQKPGQAPRGLIGGTKFLAPG |
| | | | | TPARFSGSLLGGKAALTLSGVQPEDEAEYYCVLWYSNRWVFGGGTKLTVL |
| 274. | CD33 AC8 HL x | artificial | nt | CAGGTGCAGCTGGTGCAGTCTGGAGCTGAGGTGAAGAAGCCTGGAGAGTCAGTCAAGGTCTCCTG |
| | I2C HL | | | CAAGGCTAGCGGGTATACCTTCACAAACTATGGAATGAACTGGGTGAAGCAGGCTCCAGGACAGG |
| | | | | GTTTAAAGTGGATGGGCTGGATAAACACCTACACTGGAGAGCCAACATATGCTGATGACTTCAAG |
| | | | | GGACGGGTTACCATGACTACGGATACCTCTACCAGCACTGCCTATATGGAAATCCGCAACCTCAG |
| | | | | AAATGATGACACGGCTGTATATTACTGTGCGCGCTGGAGTTGGAGTGATGGTTACTACGTTTACT |
| | | | | TTGACTACTGGGGCCAAGGCACTACGGTCACCGTCTCCTCAGGTGGTGGTGGTTCTGGCGGCGGC |
| | | | | GGCTCCGGTGGTGGTGGTTCTGACATCGTGATGACACAGTCTCCAGACTCCCTGACTGTGTCTCT |
| | | | | GGGCGAGAGGACCACCATCAACTGCAAGTCCAGCCAGAGTGTTTTAGACAGCTCCAAGAATAAGA |
| | | | | ACTCCTTAGCTTGGTACCAGCAGAAACCAGGACAGCCTCCTAAATTACTCCTTTCCTGGGCATCT |
| | | | | ACGCGGGAATCCGGGATCCCTGACCGATTCAGTGGCAGCGGGTCTGGGACAGATTTCACTCTCAC |
| | | | | TATTGACAGCCTGCAGCCTGAAGATTCTGCAACTTACTATTGTCAACAGTCTGCCCACTTCCCGA |
| | | | | TCACCTTTGGCCAAGGGACACGACTGGAGATTAAATCCGGAGGTGGTGGCTCCGAGGTGCAGCTG |
| | | | | GTCGAGTCTGGAGGAGGATTGGTGCAGCCTGGAGGGTCATTGAAACTCTCATGTGCAGCCTCTGG |
| | | | | ATTCACCTTCAATAAGTACGCCATGAACTGGGTCCGCCAGGCTCCAGGAAAGGGTTTGGAATGGG |
| | | | | TTGCTCGCATAAGAAGTAAATATAATAATTATGCAACATATTATGCCGATTCAGTGAAAGACAGG |
| | | | | TTCACCATCTCCAGAGATGATTCAAAAAACACTGCCTATCTACAAATGAACAACTTGAAAACTGA |
| | | | | GGACACTGCCGTGTACTACTGTGTGAGACATGGGAACTTCGGTAATAGCTACATATCCTACTGGG |
| | | | | CTTACTGGGGCCAAGGGACTCTGGTCACCGTCTCCTCAGGTGGTGGTGGTTCTGGCGGCGGCGGC |
| | | | | TCCGGTGGTGGTGGTTCTCAGACTGTTGTGACTCAGGAACCTTCACTCACCGTATCACCTGGTGG |
| | | | | AACAGTCACACTCACTTGTGGCTCCTCGACTGGGGCTGTTACATCTGGCAACTACCCAAACTGGG |
| | | | | TCCAACAAAAACCAGGTCAGGCACCCCGTGGTCTAATAGGTGGGACTAAGTTCCTCGCCCCCGGT |
| | | | | ACTCCTGCCAGATTCTCAGGCTCCCTGCTTGGAGGCAAGGCTGCCCTCACCCTCTCAGGGGTACA |
| | | | | GCCAGAGGATGAGGCAGAATATTACTGTGTTCTATGGTACAGCAACCGCTGGGTGTTCGGTGGAG |
| | | | | GAACCAAACTGACTGTCCTA |
| 275. | CD33 AH11 | artificial | aa | QVQLVQSGAEVKKPGESVKVSCKASGYTFTNYGMNWVKQAPGQGLKWMGWINTYTGEPTYADDFK |
| | HL x H2C HL | | | GRVTMTSDTSTSTAYMEISSLRSDDTAVYYCARWSWSDGYYVYFDYWGQGTTVTVSSggggsggg |
| | | | | gsggggsDIVMTQSPDSLTVSLGERTTINCKSSQSVLDSSKNKNSLAWYQQKPGQPPKLLLSWAS |
| | | | | TRESGIPDRFSGSGSGTDFTLTIDSLQPEDSATYYCQQSAHFPITFGQGTRLEIKSGGGGSEVQL |
| | | | | VESGGGLVQPGGSLKLSCAASGFTFNKYAMNWVRQAPGKGLEWVARIRSKYNNYATYYADSVKDR |
| | | | | FTISRDDSKNTAYLQMNNLKTEDTAVYYCVRHGNFGNSYISYWAYWGQGTLVTVSSGGGGSGGGG |
| | | | | SGGGGSQTVVTQEPSLTVSPGGTVTLTCGSSTGAVTSGYYPNWVQQKPGQAPRGLIGGTKFLAPG |
| | | | | TPARFSGSLLGGKAALTLSGVQPEDEAEYYCALWYSNRWVFGGGTKLTVL |
| 276. | CD33 AH11 | artificial | nt | CAGGTGCAGCTGGTGCAGTCTGGAGCTGAGGTGAAGAAGCCTGGAGAGTCAGTCAAGGTCTCCTG |
| | HL x H2C HL | | | CAAGGCTAGCGGGTATACCTTCACAAACTATGGAATGAACTGGGTGAAGCAGGCTCCAGGACAGG |
| | | | | GTTTAAAGTGGATGGGCTGGATAAACACCTACACTGGAGAGCCAACATATGCTGATGACTTCAAG |
| | | | | GGACGGGTTACCATGACTTCGGATACCTCTACCAGCACTGCCTATATGGAAATCAGCAGCCTCAG |
| | | | | AAGTGATGACACGGCTGTATATTACTGTGCGCGCTGGAGTTGGAGTGATGGTTACTACGTTTACT |
| | | | | TTGACTACTGGGGCCAAGGCACTACGGTCACCGTCTCCTCAGGTGGTGGTGGTTCTGGCGGCGGC |
| | | | | GGCTCCGGTGGTGGTGGTTCTGACATCGTGATGACACAGTCTCCAGACTCCCTGACTGTGTCTCT |
| | | | | GGGCGAGAGGACCACCATCAACTGCAAGTCCAGCCAGAGTGTTTTAGACAGCTCCAAGAATAAGA |
| | | | | ACTCCTTAGCTTGGTACCAGCAGAAACCAGGACAGCCTCCTAAATTACTCCTTTCCTGGGCATCT |
| | | | | ACGCGGGAATCCGGGATCCCTGACCGATTCAGTGGCAGCGGGTCTGGGACAGATTTCACTCTCAC |
| | | | | TATTGACAGCCTGCAGCCTGAAGATTCTGCAACTTACTATTGTCAACAGTCTGCCCACTTCCCGA |
| | | | | TCACCTTTGGCCAAGGGACACGACTGGAGATTAAATCCGGAGGTGGTGGCTCCGAGGTGCAGCTG |
| | | | | GTCGAGTCTGGAGGAGGATTGGTGCAGCCTGGAGGGTCATTGAAACTCTCATGTGCAGCCTCTGG |
| | | | | ATTCACCTTCAATAAGTACGCCATGAACTGGGTCCGCCAGGCTCCAGGAAAGGGTTTGGAATGGG |
| | | | | TTGCTCGCATAAGAAGTAAATATAATAATTATGCAACATATTATGCCGATTCAGTGAAAGACAGG |
| | | | | TTCACCATCTCCAGAGATGATTCAAAAAACACTGCCTATCTACAAATGAACAACTTGAAAACTGA |
| | | | | GGACACTGCCGTGTACTACTGTGTGAGACATGGGAACTTCGGTAATAGCTACATATCCTACTGGG |
| | | | | CTTACTGGGGCCAAGGGACTCTGGTCACCGTCTCCTCAGGTGGTGGTGGTTCTGGCGGCGGCGGC |
| | | | | TCCGGTGGTGGTGGTTCTCAGACTGTTGTGACTCAGGAACCTTCACTCACCGTATCACCTGGTGG |
| | | | | AACAGTCACACTCACTTGTGGCTCCTCGACTGGGGCTGTTACATCTGGCTACTACCCAAACTGGG |
| | | | | TCCAACAAAAACCAGGTCAGGCACCCCGTGGTCTAATAGGTGGGACTAAGTTCCTCGCCCCCGGT |
| | | | | ACTCCTGCCAGATTCTCAGGCTCCCTGCTTGGAGGCAAGGCTGCCCTCACCCTCTCAGGGGTACA |
| | | | | GCCAGAGGATGAGGCAGAATATTACTGTGCTCTATGGTACAGCAACCGCTGGGTGTTCGGTGGAG |
| | | | | GAACCAAACTGACTGTCCTA |
| 277. | CD33 AH11 | artificial | aa | QVQLVQSGAEVKKPGESVKVSCKASGYTFTNYGMNWVKQAPGQGLKWMGWINTYTGEPTYADDFK |
| | HL x F12Q HL | | | GRVTMTSDTSTSTAYMEISSLRSDDTAVYYCARWSWSDGYYVYFDYWGQGTTVTVSSggggsggg |
| | | | | gsggggsDIVMTQSPDSLTVSLGERTTINCKSSQSVLDSSKNKNSLAWYQQKPGQPPKLLLSWAS |
| | | | | TRESGIPDRFSGSGSGTDFTLTIDSLQPEDSATYYCQQSAHFPITFGQGTRLEIKSGGGGSEVQL |
| | | | | VESGGGLVQPGGSLKLSCAASGFTFNSYAMNWVRQAPGKGLEWVARIRSKYNNYATYYADSVKGR |
| | | | | FTISRDDSKNTAYLQMNNLKTEDTAVYYCVRHGNFGNSYVSWWAYWGQGTLVTVSSGGGGSGGGG |
| | | | | SGGGGSQTVVTQEPSLTVSPGGTVTLTCGSSTGAVTSGNYPNWVQQKPGQAPRGLIGGTKFLAPG |
| | | | | TPARFSGSLLGGKAALTLSGVQPEDEAEYYCVLWYSNRWVFGGGTKLTVL |
| 278. | CD33 AH11 | artificial | nt | CAGGTGCAGCTGGTGCAGTCTGGAGCTGAGGTGAAGAAGCCTGGAGAGTCAGTCAAGGTCTCCTG |
| | HL x F12Q HL | | | CAAGGCTAGCGGGTATACCTTCACAAACTATGGAATGAACTGGGTGAAGCAGGCTCCAGGACAGG |
| | | | | GTTTAAAGTGGATGGGCTGGATAAACACCTACACTGGAGAGCCAACATATGCTGATGACTTCAAG |
| | | | | GGACGGGTTACCATGACTTCGGATACCTCTACCAGCACTGCCTATATGGAAATCAGCAGCCTCAG |
| | | | | AAGTGATGACACGGCTGTATATTACTGTGCGCGCTGGAGTTGGAGTGATGGTTACTACGTTTACT |
| | | | | TTGACTACTGGGGCCAAGGCACTACGGTCACCGTCTCCTCAGGTGGTGGTGGTTCTGGCGGCGGC |
| | | | | GGCTCCGGTGGTGGTGGTTCTGACATCGTGATGACACAGTCTCCAGACTCCCTGACTGTGTCTCT |
| | | | | GGGCGAGAGGACCACCATCAACTGCAAGTCCAGCCAGAGTGTTTTAGACAGCTCCAAGAATAAGA |
| | | | | ACTCCTTAGCTTGGTACCAGCAGAAACCAGGACAGCCTCCTAAATTACTCCTTTCCTGGGCATCT |
| | | | | ACGCGGGAATCCGGGATCCCTGACCGATTCAGTGGCAGCGGGTCTGGGACAGATTTCACTCTCAC |
| | | | | TATTGACAGCCTGCAGCCTGAAGATTCTGCAACTTACTATTGTCAACAGTCTGCCCACTTCCCGA |
| | | | | TCACCTTTGGCCAAGGGACACGACTGGAGATTAAATCCGGAGGTGGTGGCTCCGAGGTGCAGCTG |
| | | | | GTCGAGTCTGGAGGAGGATTGGTGCAGCCTGGAGGGTCATTGAAACTCTCATGTGCAGCCTCTGG |
| | | | | ATTCACCTTCAATAGCTACGCCATGAACTGGGTCCGCCAGGCTCCAGGAAAGGGTTTGGAATGGG |
| | | | | TTGCTCGCATAAGAAGTAAATATAATAATTATGCAACATATTATGCCGATTCAGTGAAAGGCAGG |
| | | | | TTCACCATCTCCAGAGATGATTCAAAAAACACTGCCTATCTACAAATGAACAACTTGAAAACTGA |
| | | | | GGACACTGCCGTGTACTACTGTGTGAGACATGGGAACTTCGGTAATAGCTACGTTTCCTGGTGGG |
| | | | | CTTACTGGGGCCAAGGGACTCTGGTCACCGTCTCCTCAGGTGGTGGTGGTTCTGGCGGCGGCGGC |
| | | | | TCCGGTGGTGGTGGTTCTCAGACTGTTGTGACTCAGGAACCTTCACTCACCGTATCACCTGGTGG |
| | | | | AACAGTCACACTCACTTGTGGCTCCTCGACTGGGGCTGTTACATCTGGCAACTACCCAAACTGGG |
| | | | | TCCAACAAAAACCAGGTCAGGCACCCCGTGGTCTAATAGGTGGGACTAAGTTCCTCGCCCCCGGT |
| | | | | ACTCCTGCCAGATTCTCAGGCTCCCTGCTTGGAGGCAAGGCTGCCCTCACCCTCTCAGGGGTACA |
| | | | | GCCAGAGGATGAGGCAGAATATTACTGTGTTCTATGGTACAGCAACCGCTGGGTGTTCGGTGGAG |
| | | | | GAACCAAACTGACTGTCCTA |
| 279. | CD33 AH11 | artificial | aa | QVQLVQSGAEVKKPGESVKVSCKASGYTFTNYGMNWVKQAPGQGLKWMGWINTYTGEPTYADDFK |
| | HL x I2C HL | | | GRVTMTSDTSTSTAYMEISSLRSDDTAVYYCARWSWSDGYYVYFDYWGQGTTVTVSSggggsggg |
| | | | | gsggggsDIVMTQSPDSLTVSLGERTTINCKSSQSVLDSSKNKNSLAWYQQKPGQPPKLLLSWAS |
| | | | | TRESGIPDRFSGSGSGTDFTLTIDSLQPEDSATYYCQQSAHFPITFGQGTRLEIKSGGGGSEVQL |
| | | | | VESGGGLVQPGGSLKLSCAASGFTFNKYAMNWVRQAPGKGLEWVARIRSKYNNYATYYADSVKDR |
| | | | | FTISRDDSKNTAYLQMNNLKTEDTAVYYCVRHGNFGNSYISYWAYWGQGTLVTVSSGGGGSGGGG |
| | | | | SGGGGSQTVVTQEPSLTVSPGGTVTLTCGSSTGAVTSGNYPNWVQQKPGQAPRGLIGGTKFLAPG |
| | | | | TPARFSGSLLGGKAALTLSGVQPEDEAEYYCVLWYSNRWVFGGGTKLTVL |
| 280. | CD33 AH11 | artificial | nt | CAGGTGCAGCTGGTGCAGTCTGGAGCTGAGGTGAAGAAGCCTGGAGAGTCAGTCAAGGTCTCCTG |
| | HL x I2C HL | | | CAAGGCTAGCGGGTATACCTTCACAAACTATGGAATGAACTGGGTGAAGCAGGCTCCAGGACAGG |
| | | | | GTTTAAAGTGGATGGGCTGGATAAACACCTACACTGGAGAGCCAACATATGCTGATGACTTCAAG |
| | | | | GGACGGGTTACCATGACTTCGGATACCTCTACCAGCACTGCCTATATGGAAATCAGCAGCCTCAG |
| | | | | AAGTGATGACACGGCTGTATATTACTGTGCGCGCTGGAGTTGGAGTGATGGTTACTACGTTTACT |
| | | | | TTGACTACTGGGGCCAAGGCACTACGGTCACCGTCTCCTCAGGTGGTGGTGGTTCTGGCGGCGGC |
| | | | | GGCTCCGGTGGTGGTGGTTCTGACATCGTGATGACACAGTCTCCAGACTCCCTGACTGTGTCTCT |
| | | | | GGGCGAGAGGACCACCATCAACTGCAAGTCCAGCCAGAGTGTTTTAGACAGCTCCAAGAATAAGA |
| | | | | ACTCCTTAGCTTGGTACCAGCAGAAACCAGGACAGCCTCCTAAATTACTCCTTTCCTGGGCATCT |
| | | | | ACGCGGGAATCCGGGATCCCTGACCGATTCAGTGGCAGCGGGTCTGGGACAGATTTCACTCTCAC |
| | | | | TATTGACAGCCTGCAGCCTGAAGATTCTGCAACTTACTATTGTCAACAGTCTGCCCACTTCCCGA |
| | | | | TCACCTTTGGCCAAGGGACACGACTGGAGATTAAATCCGGAGGTGGTGGCTCCGAGGTGCAGCTG |
| | | | | GTCGAGTCTGGAGGAGGATTGGTGCAGCCTGGAGGGTCATTGAAACTCTCATGTGCAGCCTCTGG |
| | | | | ATTCACCTTCAATAAGTACGCCATGAACTGGGTCCGCCAGGCTCCAGGAAAGGGTTTGGAATGGG |
| | | | | TTGCTCGCATAAGAAGTAAATATAATAATTATGCAACATATTATGCCGATTCAGTGAAAGACAGG |
| | | | | TTCACCATCTCCAGAGATGATTCAAAAAACACTGCCTATCTACAAATGAACAACTTGAAAACTGA |
| | | | | GGACACTGCCGTGTACTACTGTGTGAGACATGGGAACTTCGGTAATAGCTACATATCCTACTGGG |
| | | | | CTTACTGGGGCCAAGGGACTCTGGTCACCGTCTCCTCAGGTGGTGGTGGTTCTGGCGGCGGCGGC |
| | | | | TCCGGTGGTGGTGGTTCTCAGACTGTTGTGACTCAGGAACCTTCACTCACCGTATCACCTGGTGG |
| | | | | AACAGTCACACTCACTTGTGGCTCCTCGACTGGGGCTGTTACATCTGGCAACTACCCAAACTGGG |
| | | | | TCCAACAAAAACCAGGTCAGGCACCCCGTGGTCTAATAGGTGGGACTAAGTTCCTCGCCCCCGGT |
| | | | | ACTCCTGCCAGATTCTCAGGCTCCCTGCTTGGAGGCAAGGCTGCCCTCACCCTCTCAGGGGTACA |
| | | | | GCCAGAGGATGAGGCAGAATATTACTGTGTTCTATGGTACAGCAACCGCTGGGTGTTCGGTGGAG |
| | | | | GAACCAAACTGACTGTCCTA |
| 281. | CD33 B3 | artificial | aa | QVQLVQSGAEVKKPGESVKVSCKASGYTFTNYGMNWVKQAPGQGLEWMGWINTYTGETNYADKFQ |
| | HL x H2C HL | | | GRVTFTSDTSTSTAYMELRNLKSDDTAVYYCARWSWSDGYYVYFDYWGQGTTVTVSSggggsggg |
| | | | | gsggggsDIVMTQSPDSMTVSLGERTTINCKSSQSVLDSSTNKNSLAWYQQKPGQPPKLLLSWAS |
| | | | | TRESGIPDRFSGSGSGTDFTLTIDSLQPEDSATYYCQQSAHFPITFGQGTRLDIKSGGGGSEVQL |
| | | | | VESGGGLVQPGGSLKLSCAASGFTFNKYAMNWVRQAPGKGLEWVARIRSKYNNYATYYADSVKDR |
| | | | | FTISRDDSKNTAYLQMNNLKTEDTAVYYCVRHGNFGNSYISYWAYWGQGTLVTVSSGGGGSGGGG |
| | | | | SGGGGSQTVVTQEPSLTVSPGGTVTLTCGSSTGAVTSGYYPNWVQQKPGQAPRGLIGGTKFLAPG |
| | | | | TPARFSGSLLGGKAALTLSGVQPEDEAEYYCALWYSNRWVFGGGTKLTVL |
| 282. | CD33 B3 | artificial | nt | CAGGTGCAGCTGGTGCAGTCTGGAGCTGAGGTGAAGAAGCCTGGAGAGTCAGTCAAGGTCTCCTG |
| | HL x H2C HL | | | CAAGGCTAGCGGGTATACCTTCACAAACTATGGAATGAACTGGGTGAAGCAGGCTCCAGGACAGG |
| | | | | GTTTAGAGTGGATGGGCTGGATAAACACCTACACTGGAGAGACAAACTATGCTGATAAGTTCCAG |
| | | | | GGACGCGTTACCTTCACTTCGGATACCTCTACCAGCACTGCCTATATGGAACTCCGCAACCTCAA |
| | | | | AAGTGATGACACGGCTGTATATTACTGTGCGCGCTGGAGTTGGAGTGATGGTTACTACGTTTACT |
| | | | | TTGACTACTGGGGCCAAGGCACTACGGTCACCGTCTCCTCAGGTGGTGGTGGTTCTGGCGGCGGC |
| | | | | GGCTCCGGTGGTGGTGGTTCTGACATCGTGATGACACAGTCTCCAGACTCCATGACTGTGTCTCT |
| | | | | GGGCGAGAGGACCACCATCAACTGCAAGTCCAGCCAGAGTGTTTTAGACAGCTCCACGAATAAGA |
| | | | | ACTCCTTAGCTTGGTACCAGCAGAAACCAGGACAGCCTCCTAAATTACTCCTTTCCTGGGCATCT |
| | | | | ACGCGGGAATCCGGGATCCCTGACCGATTCAGTGGCAGCGGGTCTGGGACAGATTTCACTCTCAC |
| | | | | TATTGACAGCCTGCAGCCTGAAGATTCTGCAACTTACTATTGTCAACAGTCTGCCCACTTCCCGA |
| | | | | TCACCTTTGGCCAAGGGACACGACTGGACATTAAATCCGGAGGTGGTGGCTCCGAGGTGCAGCTG |
| | | | | GTCGAGTCTGGAGGAGGATTGGTGCAGCCTGGAGGGTCATTGAAACTCTCATGTGCAGCCTCTGG |
| | | | | ATTCACCTTCAATAAGTACGCCATGAACTGGGTCCGCCAGGCTCCAGGAAAGGGTTTGGAATGGG |
| | | | | TTGCTCGCATAAGAAGTAAATATAATAATTATGCAACATATTATGCCGATTCAGTGAAAGACAGG |
| | | | | TTCACCATCTCCAGAGATGATTCAAAAAACACTGCCTATCTACAAATGAACAACTTGAAAACTGA |
| | | | | GGACACTGCCGTGTACTACTGTGTGAGACATGGGAACTTCGGTAATAGCTACATATCCTACTGGG |
| | | | | CTTACTGGGGCCAAGGGACTCTGGTCACCGTCTCCTCAGGTGGTGGTGGTTCTGGCGGCGGCGGC |
| | | | | TCCGGTGGTGGTGGTTCTCAGACTGTTGTGACTCAGGAACCTTCACTCACCGTATCACCTGGTGG |
| | | | | AACAGTCACACTCACTTGTGGCTCCTCGACTGGGGCTGTTACATCTGGCTACTACCCAAACTGGG |
| | | | | TCCAACAAAAACCAGGTCAGGCACCCCGTGGTCTAATAGGTGGGACTAAGTTCCTCGCCCCCGGT |
| | | | | ACTCCTGCCAGATTCTCAGGCTCCCTGCTTGGAGGCAAGGCTGCCCTCACCCTCTCAGGGGTACA |
| | | | | GCCAGAGGATGAGGCAGAATATTACTGTGCTCTATGGTACAGCAACCGCTGGGTGTTCGGTGGAG |
| | | | | GAACCAAACTGACTGTCCTA |
| 283. | CD33 B3 | artificial | aa | QVQLVQSGAEVKKPGESVKVSCKASGYTFTNYGMNWVKQAPGQGLEWMGWINTYTGETNYADKFQ |
| | HL x F12Q HL | | | GRVTFTSDTSTSTAYMELRNLKSDDTAVYYCARWSWSDGYYVYFDYWGQGTTVTVSSggggsggg |
| | | | | gsggggsDIVMTQSPDSMTVSLGERTTINCKSSQSVLDSSTNKNSLAWYQQKPGQPPKLLLSWAS |
| | | | | TRESGIPDRFSGSGSGTDFTLTIDSLQPEDSATYYCQQSAHFPITFGQGTRLDIKSGGGGSEVQL |
| | | | | VESGGGLVQPGGSLKLSCAASGFTFNSYAMNWVRQAPGKGLEWVARIRSKYNNYATYYADSVKGR |
| | | | | FTISRDDSKNTAYLQMNNLKTEDTAVYYCVRHGNFGNSYVSWWAYWGQGTLVTVSSGGGGSGGGG |
| | | | | SGGGGSQTVVTQEPSLTVSPGGTVTLTCGSSTGAVTSGNYPNWVQQKPGQAPRGLIGGTKFLAPG |
| | | | | TPARFSGSLLGGKAALTLSGVQPEDEAEYYCVLWYSNRWVFGGGTKLTVL |
| 284. | CD33 B3 | artificial | nt | CAGGTGCAGCTGGTGCAGTCTGGAGCTGAGGTGAAGAAGCCTGGAGAGTCAGTCAAGGTCTCCTG |
| | HL x F12Q HL | | | CAAGGCTAGCGGGTATACCTTCACAAACTATGGAATGAACTGGGTGAAGCAGGCTCCAGGACAGG |
| | | | | GTTTAGAGTGGATGGGCTGGATAAACACCTACACTGGAGAGACAAACTATGCTGATAAGTTCCAG |
| | | | | GGACGCGTTACCTTCACTTCGGATACCTCTACCAGCACTGCCTATATGGAACTCCGCAACCTCAA |
| | | | | AAGTGATGACACGGCTGTATATTACTGTGCGCGCTGGAGTTGGAGTGATGGTTACTACGTTTACT |
| | | | | TTGACTACTGGGGCCAAGGCACTACGGTCACCGTCTCCTCAGGTGGTGGTGGTTCTGGCGGCGGC |
| | | | | GGCTCCGGTGGTGGTGGTTCTGACATCGTGATGACACAGTCTCCAGACTCCATGACTGTGTCTCT |
| | | | | GGGCGAGAGGACCACCATCAACTGCAAGTCCAGCCAGAGTGTTTTAGACAGCTCCACGAATAAGA |
| | | | | ACTCCTTAGCTTGGTACCAGCAGAAACCAGGACAGCCTCCTAAATTACTCCTTTCCTGGGCATCT |
| | | | | ACGCGGGAATCCGGGATCCCTGACCGATTCAGTGGCAGCGGGTCTGGGACAGATTTCACTCTCAC |
| | | | | TATTGACAGCCTGCAGCCTGAAGATTCTGCAACTTACTATTGTCAACAGTCTGCCCACTTCCCGA |
| | | | | TCACCTTTGGCCAAGGGACACGACTGGACATTAAATCCGGAGGTGGTGGCTCCGAGGTGCAGCTG |
| | | | | GTCGAGTCTGGAGGAGGATTGGTGCAGCCTGGAGGGTCATTGAAACTCTCATGTGCAGCCTCTGG |
| | | | | ATTCACCTTCAATAGCTACGCCATGAACTGGGTCCGCCAGGCTCCAGGAAAGGGTTTGGAATGGG |
| | | | | TTGCTCGCATAAGAAGTAAATATAATAATTATGCAACATATTATGCCGATTCAGTGAAAGGCAGG |
| | | | | TTCACCATCTCCAGAGATGATTCAAAAAACACTGCCTATCTACAAATGAACAACTTGAAAACTGA |
| | | | | GGACACTGCCGTGTACTACTGTGTGAGACATGGGAACTTCGGTAATAGCTACGTTTCCTGGTGGG |
| | | | | CTTACTGGGGCCAAGGGACTCTGGTCACCGTCTCCTCAGGTGGTGGTGGTTCTGGCGGCGGCGGC |
| | | | | TCCGGTGGTGGTGGTTCTCAGACTGTTGTGACTCAGGAACCTTCACTCACCGTATCACCTGGTGG |
| | | | | AACAGTCACACTCACTTGTGGCTCCTCGACTGGGGCTGTTACATCTGGCAACTACCCAAACTGGG |
| | | | | TCCAACAAAAACCAGGTCAGGCACCCCGTGGTCTAATAGGTGGGACTAAGTTCCTCGCCCCCGGT |
| | | | | ACTCCTGCCAGATTCTCAGGCTCCCTGCTTGGAGGCAAGGCTGCCCTCACCCTCTCAGGGGTACA |
| | | | | GCCAGAGGATGAGGCAGAATATTACTGTGTTCTATGGTACAGCAACCGCTGGGTGTTCGGTGGAG |
| | | | | GAACCAAACTGACTGTCCTA |
| 285. | CD33 B3 | artificial | aa | QVQLVQSGAEVKKPGESVKVSCKASGYTFTNYGMNWVKQAPGQGLEWMGWINTYTGETNYADKFQ |
| | HL x I2C HL | | | GRVTFTSDTSTSTAYMELRNLKSDDTAVYYCARWSWSDGYYVYFDYWGQGTTVTVSSggggsggg |
| | | | | gsggggsDIVMTQSPDSMTVSLGERTTINCKSSQSVLDSSTNKNSLAWYQQKPGQPPKLLLSWAS |
| | | | | TRESGIPDRFSGSGSGTDFTLTIDSLQPEDSATYYCQQSAHFPITFGQGTRLDIKSGGGGSEVQL |
| | | | | VESGGGLVQPGGSLKLSCAASGFTFNKYAMNWVRQAPGKGLEWVARIRSKYNNYATYYADSVKDR |
| | | | | FTISRDDSKNTAYLQMNNLKTEDTAVYYCVRHGNFGNSYISYWAYWGQGTLVTVSSGGGGSGGGG |
| | | | | SGGGGSQTVVTQEPSLTVSPGGTVTLTCGSSTGAVTSGNYPNWVQQKPGQAPRGLIGGTKFLAPG |
| | | | | TPARFSGSLLGGKAALTLSGVQPEDEAEYYCVLWYSNRWVFGGGTKLTVL |
| 286. | CD33 B3 | artificial | nt | CAGGTGCAGCTGGTGCAGTCTGGAGCTGAGGTGAAGAAGCCTGGAGAGTCAGTCAAGGTCTCCTG |
| | HL x I2C HL | | | CAAGGCTAGCGGGTATACCTTCACAAACTATGGAATGAACTGGGTGAAGCAGGCTCCAGGACAGG |
| | | | | GTTTAGAGTGGATGGGCTGGATAAACACCTACACTGGAGAGACAAACTATGCTGATAAGTTCCAG |
| | | | | GGACGCGTTACCTTCACTTCGGATACCTCTACCAGCACTGCCTATATGGAACTCCGCAACCTCAA |
| | | | | AAGTGATGACACGGCTGTATATTACTGTGCGCGCTGGAGTTGGAGTGATGGTTACTACGTTTACT |
| | | | | TTGACTACTGGGGCCAAGGCACTACGGTCACCGTCTCCTCAGGTGGTGGTGGTTCTGGCGGCGGC |
| | | | | GGCTCCGGTGGTGGTGGTTCTGACATCGTGATGACACAGTCTCCAGACTCCATGACTGTGTCTCT |
| | | | | GGGCGAGAGGACCACCATCAACTGCAAGTCCAGCCAGAGTGTTTTAGACAGCTCCACGAATAAGA |
| | | | | ACTCCTTAGCTTGGTACCAGCAGAAACCAGGACAGCCTCCTAAATTACTCCTTTCCTGGGCATCT |
| | | | | ACGCGGGAATCCGGGATCCCTGACCGATTCAGTGGCAGCGGGTCTGGGACAGATTTCACTCTCAC |
| | | | | TATTGACAGCCTGCAGCCTGAAGATTCTGCAACTTACTATTGTCAACAGTCTGCCCACTTCCCGA |
| | | | | TCACCTTTGGCCAAGGGACACGACTGGACATTAAATCCGGAGGTGGTGGCTCCGAGGTGCAGCTG |
| | | | | GTCGAGTCTGGAGGAGGATTGGTGCAGCCTGGAGGGTCATTGAAACTCTCATGTGCAGCCTCTGG |
| | | | | ATTCACCTTCAATAAGTACGCCATGAACTGGGTCCGCCAGGCTCCAGGAAAGGGTTTGGAATGGG |
| | | | | TTGCTCGCATAAGAAGTAAATATAATAATTATGCAACATATTATGCCGATTCAGTGAAAGACAGG |
| | | | | TTCACCATCTCCAGAGATGATTCAAAAAACACTGCCTATCTACAAATGAACAACTTGAAAACTGA |
| | | | | GGACACTGCCGTGTACTACTGTGTGAGACATGGGAACTTCGGTAATAGCTACATATCCTACTGGG |
| | | | | CTTACTGGGGCCAAGGGACTCTGGTCACCGTCTCCTCAGGTGGTGGTGGTTCTGGCGGCGGCGGC |
| | | | | TCCGGTGGTGGTGGTTCTCAGACTGTTGTGACTCAGGAACCTTCACTCACCGTATCACCTGGTGG |
| | | | | AACAGTCACACTCACTTGTGGCTCCTCGACTGGGGCTGTTACATCTGGCAACTACCCAAACTGGG |
| | | | | TCCAACAAAAACCAGGTCAGGCACCCCGTGGTCTAATAGGTGGGACTAAGTTCCTCGCCCCCGGT |
| | | | | ACTCCTGCCAGATTCTCAGGCTCCCTGCTTGGAGGCAAGGCTGCCCTCACCCTCTCAGGGGTACA |
| | | | | GCCAGAGGATGAGGCAGAATATTACTGTGTTCTATGGTACAGCAACCGCTGGGTGTTCGGTGGAG |
| | | | | GAACCAAACTGACTGTCCTA |
| 287. | CD33 F2 | artificial | aa | QVQLVQSGAEVKKPGESVKVSCKASGYTFTNYGMNWVKQAPGQGLEWMGWINTYTGETNYADKFQ |
| | HL x H2C HL | | | GRVTFTSDTSTSTAYMELRNLKSDDTAVYYCARWSWSDGYYVYFDYWGQGTTVTVSSggggsggg |
| | | | | gsggggsDIVMTQSPDSLSVSLGERTTINCKSSQSVLDSSTNKNSLAWYQQKPGQPPKLLLSWAS |
| | | | | TRESGIPDRFSGSGSGTDFTLTIDSLQPEDSATYYCQQSAHFPITFGQGTRLEIKSGGGGSEVQL |
| | | | | VESGGGLVQPGGSLKLSCAASGFTFNKYAMNWVRQAPGKGLEWVARIRSKYNNYATYYADSVKDR |
| | | | | FTISRDDSKNTAYLQMNNLKTEDTAVYYCVRHGNFGNSYISYWAYWGQGTLVTVSSGGGGSGGGG |
| | | | | SGGGGSQTVVTQEPSLTVSPGGTVTLTCGSSTGAVTSGYYPNWVQQKPGQAPRGLIGGTKFLAPG |
| | | | | TPARFSGSLLGGKAALTLSGVQPEDEAEYYCALWYSNRWVFGGGTKLTVL |
| 288. | CD33 F2 | artificial | nt | CAGGTGCAGCTGGTGCAGTCTGGAGCTGAGGTGAAGAAGCCTGGAGAGTCAGTCAAGGTCTCCTG |
| | HL x H2C HL | | | CAAGGCTAGCGGGTATACCTTCACAAACTATGGAATGAACTGGGTGAAGCAGGCTCCAGGACAGG |
| | | | | GTTTAGAGTGGATGGGCTGGATAAACACCTACACTGGAGAGACAAACTATGCTGATAAGTTCCAG |
| | | | | GGACGCGTTACCTTCACTTCGGATACCTCTACCAGCACTGCCTATATGGAACTCCGCAACCTCAA |
| | | | | AAGTGATGACACGGCTGTATATTACTGTGCGCGCTGGAGTTGGAGTGATGGTTACTACGTTTACT |
| | | | | TTGACTACTGGGGCCAAGGCACTACGGTCACCGTCTCCTCAGGTGGTGGTGGTTCTGGCGGCGGC |
| | | | | GGCTCCGGTGGTGGTGGTTCTGACATCGTGATGACACAGTCTCCAGACTCCCTGTCTGTGTCTCT |
| | | | | GGGCGAGAGGACCACCATCAACTGCAAGTCCAGCCAGAGTGTTTTAGACAGCTCCACGAATAAGA |
| | | | | ACTCCTTAGCTTGGTACCAGCAGAAACCAGGACAGCCTCCTAAATTACTCCTTTCCTGGGCATCT |
| | | | | ACGCGGGAATCCGGGATCCCTGACCGATTCAGTGGCAGCGGGTCTGGGACAGATTTCACTCTCAC |
| | | | | TATTGACAGCCTGCAGCCTGAAGATTCTGCAACTTACTATTGTCAACAGTCTGCCCACTTCCCGA |
| | | | | TCACCTTTGGCCAAGGGACACGACTGGAGATTAAATCCGGAGGTGGTGGCTCCGAGGTGCAGCTG |
| | | | | GTCGAGTCTGGAGGAGGATTGGTGCAGCCTGGAGGGTCATTGAAACTCTCATGTGCAGCCTCTGG |
| | | | | ATTCACCTTCAATAAGTACGCCATGAACTGGGTCCGCCAGGCTCCAGGAAAGGGTTTGGAATGGG |
| | | | | TTGCTCGCATAAGAAGTAAATATAATAATTATGCAACATATTATGCCGATTCAGTGAAAGACAGG |
| | | | | TTCACCATCTCCAGAGATGATTCAAAAAACACTGCCTATCTACAAATGAACAACTTGAAAACTGA |
| | | | | GGACACTGCCGTGTACTACTGTGTGAGACATGGGAACTTCGGTAATAGCTACATATCCTACTGGG |
| | | | | CTTACTGGGGCCAAGGGACTCTGGTCACCGTCTCCTCAGGTGGTGGTGGTTCTGGCGGCGGCGGC |
| | | | | TCCGGTGGTGGTGGTTCTCAGACTGTTGTGACTCAGGAACCTTCACTCACCGTATCACCTGGTGG |
| | | | | AACAGTCACACTCACTTGTGGCTCCTCGACTGGGGCTGTTACATCTGGCTACTACCCAAACTGGG |
| | | | | TCCAACAAAAACCAGGTCAGGCACCCCGTGGTCTAATAGGTGGGACTAAGTTCCTCGCCCCCGGT |
| | | | | ACTCCTGCCAGATTCTCAGGCTCCCTGCTTGGAGGCAAGGCTGCCCTCACCCTCTCAGGGGTACA |
| | | | | GCCAGAGGATGAGGCAGAATATTACTGTGCTCTATGGTACAGCAACCGCTGGGTGTTCGGTGGAG |
| | | | | GAACCAAACTGACTGTCCTA |
| 289. | CD33 F2 | artificial | aa | QVQLVQSGAEVKKPGESVKVSCKASGYTFTNYGMNWVKQAPGQGLEWMGWINTYTGETNYADKFQ |
| | HL x F12Q HL | | | GRVTFTSDTSTSTAYMELRNLKSDDTAVYYCARWSWSDGYYVYFDYWGQGTTVTVSSggggsggg |
| | | | | gsggggsDIVMTQSPDSLSVSLGERTTINCKSSQSVLDSSTNKNSLAWYQQKPGQPPKLLLSWAS |
| | | | | TRESGIPDRFSGSGSGTDFTLTIDSLQPEDSATYYCQQSAHFPITFGQGTRLEIKSGGGGSEVQL |
| | | | | VESGGGLVQPGGSLKLSCAASGFTFNSYAMNWVRQAPGKGLEWVARIRSKYNNYATYYADSVKGR |
| | | | | FTISRDDSKNTAYLQMNNLKTEDTAVYYCVRHGNFGNSYVSWWAYWGQGTLVTVSSGGGGSGGGG |
| | | | | SGGGGSQTVVTQEPSLTVSPGGTVTLTCGSSTGAVTSGNYPNWVQQKPGQAPRGLIGGTKFLAPG |
| | | | | TPARFSGSLLGGKAALTLSGVQPEDEAEYYCVLWYSNRWVFGGGTKLTVL |
| 290. | CD33 F2 | artificial | nt | CAGGTGCAGCTGGTGCAGTCTGGAGCTGAGGTGAAGAAGCCTGGAGAGTCAGTCAAGGTCTCCTG |
| | HL x F12Q HL | | | CAAGGCTAGCGGGTATACCTTCACAAACTATGGAATGAACTGGGTGAAGCAGGCTCCAGGACAGG |
| | | | | GTTTAGAGTGGATGGGCTGGATAAACACCTACACTGGAGAGACAAACTATGCTGATAAGTTCCAG |
| | | | | GGACGCGTTACCTTCACTTCGGATACCTCTACCAGCACTGCCTATATGGAACTCCGCAACCTCAA |
| | | | | AAGTGATGACACGGCTGTATATTACTGTGCGCGCTGGAGTTGGAGTGATGGTTACTACGTTTACT |
| | | | | TTGACTACTGGGGCCAAGGCACTACGGTCACCGTCTCCTCAGGTGGTGGTGGTTCTGGCGGCGGC |
| | | | | GGCTCCGGTGGTGGTGGTTCTGACATCGTGATGACACAGTCTCCAGACTCCCTGTCTGTGTCTCT |
| | | | | GGGCGAGAGGACCACCATCAACTGCAAGTCCAGCCAGAGTGTTTTAGACAGCTCCACGAATAAGA |
| | | | | ACTCCTTAGCTTGGTACCAGCAGAAACCAGGACAGCCTCCTAAATTACTCCTTTCCTGGGCATCT |
| | | | | ACGCGGGAATCCGGGATCCCTGACCGATTCAGTGGCAGCGGGTCTGGGACAGATTTCACTCTCAC |
| | | | | TATTGACAGCCTGCAGCCTGAAGATTCTGCAACTTACTATTGTCAACAGTCTGCCCACTTCCCGA |
| | | | | TCACCTTTGGCCAAGGGACACGACTGGAGATTAAATCCGGAGGTGGTGGCTCCGAGGTGCAGCTG |
| | | | | GTCGAGTCTGGAGGAGGATTGGTGCAGCCTGGAGGGTCATTGAAACTCTCATGTGCAGCCTCTGG |
| | | | | ATTCACCTTCAATAGCTACGCCATGAACTGGGTCCGCCAGGCTCCAGGAAAGGGTTTGGAATGGG |
| | | | | TTGCTCGCATAAGAAGTAAATATAATAATTATGCAACATATTATGCCGATTCAGTGAAAGGCAGG |
| | | | | TTCACCATCTCCAGAGATGATTCAAAAAACACTGCCTATCTACAAATGAACAACTTGAAAACTGA |
| | | | | GGACACTGCCGTGTACTACTGTGTGAGACATGGGAACTTCGGTAATAGCTACGTTTCCTGGTGGG |
| | | | | CTTACTGGGGCCAAGGGACTCTGGTCACCGTCTCCTCAGGTGGTGGTGGTTCTGGCGGCGGCGGC |
| | | | | TCCGGTGGTGGTGGTTCTCAGACTGTTGTGACTCAGGAACCTTCACTCACCGTATCACCTGGTGG |
| | | | | AACAGTCACACTCACTTGTGGCTCCTCGACTGGGGCTGTTACATCTGGCAACTACCCAAACTGGG |
| | | | | TCCAACAAAAACCAGGTCAGGCACCCCGTGGTCTAATAGGTGGGACTAAGTTCCTCGCCCCCGGT |
| | | | | ACTCCTGCCAGATTCTCAGGCTCCCTGCTTGGAGGCAAGGCTGCCCTCACCCTCTCAGGGGTACA |
| | | | | GCCAGAGGATGAGGCAGAATATTACTGTGTTCTATGGTACAGCAACCGCTGGGTGTTCGGTGGAG |
| | | | | GAACCAAACTGACTGTCCTA |
| 291. | CD33 F2 | artificial | aa | QVQLVQSGAEVKKPGESVKVSCKASGYTFTNYGMNWVKQAPGQGLEWMGWINTYTGETNYADKFQ |
| | HL x I2C HL | | | GRVTFTSDTSTSTAYMELRNLKSDDTAVYYCARWSWSDGYYVYFDYWGQGTTVTVSSggggsggg |
| | | | | gsggggsDIVMTQSPDSLSVSLGERTTINCKSSQSVLDSSTNKNSLAWYQQKPGQPPKLLLSWAS |
| | | | | TRESGIPDRFSGSGSGTDFTLTIDSLQPEDSATYYCQQSAHFPITFGQGTRLEIKSGGGGSEVQL |
| | | | | VESGGGLVQPGGSLKLSCAASGFTFNKYAMNWVRQAPGKGLEWVARIRSKYNNYATYYADSVKDR |
| | | | | FTISRDDSKNTAYLQMNNLKTEDTAVYYCVRHGNFGNSYISYWAYWGQGTLVTVSSGGGGSGGGG |
| | | | | SGGGGSQTVVTQEPSLTVSPGGTVTLTCGSSTGAVTSGNYPNWVQQKPGQAPRGLIGGTKFLAPG |
| | | | | TPARFSGSLLGGKAALTLSGVQPEDEAEYYCVLWYSNRWVFGGGTKLTVL |
| 292. | CD33 F2 | artificial | nt | CAGGTGCAGCTGGTGCAGTCTGGAGCTGAGGTGAAGAAGCCTGGAGAGTCAGTCAAGGTCTCCTG |
| | HL x I2C HL | | | CAAGGCTAGCGGGTATACCTTCACAAACTATGGAATGAACTGGGTGAAGCAGGCTCCAGGACAGG |
| | | | | GTTTAGAGTGGATGGGCTGGATAAACACCTACACTGGAGAGACAAACTATGCTGATAAGTTCCAG |
| | | | | GGACGCGTTACCTTCACTTCGGATACCTCTACCAGCACTGCCTATATGGAACTCCGCAACCTCAA |
| | | | | AAGTGATGACACGGCTGTATATTACTGTGCGCGCTGGAGTTGGAGTGATGGTTACTACGTTTACT |
| | | | | TTGACTACTGGGGCCAAGGCACTACGGTCACCGTCTCCTCAGGTGGTGGTGGTTCTGGCGGCGGC |
| | | | | GGCTCCGGTGGTGGTGGTTCTGACATCGTGATGACACAGTCTCCAGACTCCCTGTCTGTGTCTCT |
| | | | | GGGCGAGAGGACCACCATCAACTGCAAGTCCAGCCAGAGTGTTTTAGACAGCTCCACGAATAAGA |
| | | | | ACTCCTTAGCTTGGTACCAGCAGAAACCAGGACAGCCTCCTAAATTACTCCTTTCCTGGGCATCT |
| | | | | ACGCGGGAATCCGGGATCCCTGACCGATTCAGTGGCAGCGGGTCTGGGACAGATTTCACTCTCAC |
| | | | | TATTGACAGCCTGCAGCCTGAAGATTCTGCAACTTACTATTGTCAACAGTCTGCCCACTTCCCGA |
| | | | | TCACCTTTGGCCAAGGGACACGACTGGAGATTAAATCCGGAGGTGGTGGCTCCGAGGTGCAGCTG |
| | | | | GTCGAGTCTGGAGGAGGATTGGTGCAGCCTGGAGGGTCATTGAAACTCTCATGTGCAGCCTCTGG |
| | | | | ATTCACCTTCAATAAGTACGCCATGAACTGGGTCCGCCAGGCTCCAGGAAAGGGTTTGGAATGGG |
| | | | | TTGCTCGCATAAGAAGTAAATATAATAATTATGCAACATATTATGCCGATTCAGTGAAAGACAGG |
| | | | | TTCACCATCTCCAGAGATGATTCAAAAAACACTGCCTATCTACAAATGAACAACTTGAAAACTGA |
| | | | | GGACACTGCCGTGTACTACTGTGTGAGACATGGGAACTTCGGTAATAGCTACATATCCTACTGGG |
| | | | | CTTACTGGGGCCAAGGGACTCTGGTCACCGTCTCCTCAGGTGGTGGTGGTTCTGGCGGCGGCGGC |
| | | | | TCCGGTGGTGGTGGTTCTCAGACTGTTGTGACTCAGGAACCTTCACTCACCGTATCACCTGGTGG |
| | | | | AACAGTCACACTCACTTGTGGCTCCTCGACTGGGGCTGTTACATCTGGCAACTACCCAAACTGGG |
| | | | | TCCAACAAAAACCAGGTCAGGCACCCCGTGGTCTAATAGGTGGGACTAAGTTCCTCGCCCCCGGT |
| | | | | ACTCCTGCCAGATTCTCAGGCTCCCTGCTTGGAGGCAAGGCTGCCCTCACCCTCTCAGGGGTACA |
| | | | | GCCAGAGGATGAGGCAGAATATTACTGTGTTCTATGGTACAGCAACCGCTGGGTGTTCGGTGGAG |
| | | | | GAACCAAACTGACTGTCCTA |
| 293. | CD33 B10 | artificial | aa | QVQLVQSGAEVKKPGESVKVSCKASGYTFTNYGMNWVKQAPGQGLEWMGWINTYTGEPTYADKFQ |
| | HL x H2C HL | | | GRVTMTTDTSTSTAYMEIRNLRSDDTAVYYCARWSWSDGYYVYFDYWGQGTTVTVSSggggsggg |
| | | | | gsggggsDIVMTQSPDSLTVSLGERTTINCKSSQSVLDSSNNKNSLAWYQQKPGQPPKLLLSWAS |
| | | | | TRESGIPDRFSGSGSGTDFTLTIDGLQPEDSATYYCQQSAHFPITFGQGTRLEIKSGGGGSEVQL |
| | | | | VESGGGLVQPGGSLKLSCAASGFTFNKYAMNWVRQAPGKGLEWVARIRSKYNNYATYYADSVKDR |
| | | | | FTISRDDSKNTAYLQMNNLKTEDTAVYYCVRHGNFGNSYISYWAYWGQGTLVTVSSGGGGSGGGG |
| | | | | SGGGGSQTVVTQEPSLTVSPGGTVTLTCGSSTGAVTSGYYPNWVQQKPGQAPRGLIGGTKFLAPG |
| | | | | TPARFSGSLLGGKAALTLSGVQPEDEAEYYCALWYSNRWVFGGGTKLTVL |
| 294. | CD33 B10 | artificial | nt | CAGGTGCAGCTGGTGCAGTCTGGAGCTGAGGTGAAGAAGCCTGGTGAGTCAGTCAAGGTCTCCTG |
| | HL x H2C HL | | | CAAGGCTAGCGGGTATACCTTCACAAACTATGGAATGAACTGGGTGAAGCAGGCTCCAGGACAGG |
| | | | | GTTTAGAGTGGATGGGCTGGATAAACACCTACACTGGAGAGCCAACCTATGCTGATAAGTTCCAG |
| | | | | GGACGCGTTACCATGACTACGGATACCTCTACCAGCACTGCCTATATGGAAATCCGCAACCTCAG |
| | | | | AAGTGATGACACGGCTGTATATTACTGTGCGCGCTGGAGTTGGAGTGATGGTTACTACGTTTACT |
| | | | | TTGACTACTGGGGCCAAGGCACTACGGTCACCGTCTCCTCAGGTGGTGGTGGTTCTGGCGGCGGC |
| | | | | GGCTCCGGTGGTGGTGGTTCTGACATCGTGATGACACAGTCTCCAGACTCCCTGACTGTGTCTCT |
| | | | | GGGCGAGAGGACCACCATCAACTGCAAGTCCAGCCAGAGTGTTTTAGACAGCTCCAACAATAAGA |
| | | | | ACTCCTTAGCTTGGTACCAGCAGAAACCAGGACAGCCTCCTAAATTACTCCTTTCCTGGGCATCT |
| | | | | ACGCGGGAATCCGGGATCCCTGACCGATTCAGTGGCAGCGGTTCTGGGACAGATTTCACTCTCAC |
| | | | | TATTGACGGCCTGCAGCCTGAAGATTCTGCAACTTACTATTGTCAACAGTCTGCCCACTTCCCGA |
| | | | | TCACCTTTGGCCAAGGGACACGACTGGAGATTAAATCCGGAGGTGGTGGCTCCGAGGTGCAGCTG |
| | | | | GTCGAGTCTGGAGGAGGATTGGTGCAGCCTGGAGGGTCATTGAAACTCTCATGTGCAGCCTCTGG |
| | | | | ATTCACCTTCAATAAGTACGCCATGAACTGGGTCCGCCAGGCTCCAGGAAAGGGTTTGGAATGGG |
| | | | | TTGCTCGCATAAGAAGTAAATATAATAATTATGCAACATATTATGCCGATTCAGTGAAAGACAGG |
| | | | | TTCACCATCTCCAGAGATGATTCAAAAAACACTGCCTATCTACAAATGAACAACTTGAAAACTGA |
| | | | | GGACACTGCCGTGTACTACTGTGTGAGACATGGGAACTTCGGTAATAGCTACATATCCTACTGGG |
| | | | | CTTACTGGGGCCAAGGGACTCTGGTCACCGTCTCCTCAGGTGGTGGTGGTTCTGGCGGCGGCGGC |
| | | | | TCCGGTGGTGGTGGTTCTCAGACTGTTGTGACTCAGGAACCTTCACTCACCGTATCACCTGGTGG |
| | | | | AACAGTCACACTCACTTGTGGCTCCTCGACTGGGGCTGTTACATCTGGCTACTACCCAAACTGGG |
| | | | | TCCAACAAAAACCAGGTCAGGCACCCCGTGGTCTAATAGGTGGGACTAAGTTCCTCGCCCCCGGT |
| | | | | ACTCCTGCCAGATTCTCAGGCTCCCTGCTTGGAGGCAAGGCTGCCCTCACCCTCTCAGGGGTACA |
| | | | | GCCAGAGGATGAGGCAGAATATTACTGTGCTCTATGGTACAGCAACCGCTGGGTGTTCGGTGGAG |
| | | | | GAACCAAACTGACTGTCCTA |
| 295. | CD33 B10 HL x | artificial | aa | QVQLVQSGAEVKKPGESVKVSCKASGYTFTNYGMNWVKQAPGQGLEWMGWINTYTGEPTYADKFQ |
| | F12Q HL | | | GRVTMTTDTSTSTAYMEIRNLRSDDTAVYYCARWSWSDGYYVYFDYWGQGTTVTVSSggggsggg |
| | | | | gsggggsDIVMTQSPDSLTVSLGERTTINCKSSQSVLDSSNNKNSLAWYQQKPGQPPKLLLSWAS |
| | | | | TRESGIPDRFSGSGSGTDFTLTIDGLQPEDSATYYCQQSAHFPITFGQGTRLEIKSGGGGSEVQL |
| | | | | VESGGGLVQPGGSLKLSCAASGFTFNSYAMNWVRQAPGKGLEWVARIRSKYNNYATYYADSVKGR |
| | | | | FTISRDDSKNTAYLQMNNLKTEDTAVYYCVRHGNFGNSYVSWWAYWGQGTLVTVSSGGGGSGGGG |
| | | | | SGGGGSQTVVTQEPSLTVSPGGTVTLTCGSSTGAVTSGNYPNWVQQKPGQAPRGLIGGTKFLAPG |
| | | | | TPARFSGSLLGGKAALTLSGVQPEDEAEYYCVLWYSNRWVFGGGTKLTVL |
| 296. | CD33 B10 HL x | artificial | nt | CAGGTGCAGCTGGTGCAGTCTGGAGCTGAGGTGAAGAAGCCTGGTGAGTCAGTCAAGGTCTCCTG |
| | F12Q HL | | | CAAGGCTAGCGGGTATACCTTCACAAACTATGGAATGAACTGGGTGAAGCAGGCTCCAGGACAGG |
| | | | | GTTTAGAGTGGATGGGCTGGATAAACACCTACACTGGAGAGCCAACCTATGCTGATAAGTTCCAG |
| | | | | GGACGCGTTACCATGACTACGGATACCTCTACCAGCACTGCCTATATGGAAATCCGCAACCTCAG |
| | | | | AAGTGATGACACGGCTGTATATTACTGTGCGCGCTGGAGTTGGAGTGATGGTTACTACGTTTACT |
| | | | | TTGACTACTGGGGCCAAGGCACTACGGTCACCGTCTCCTCAGGTGGTGGTGGTTCTGGCGGCGGC |
| | | | | GGCTCCGGTGGTGGTGGTTCTGACATCGTGATGACACAGTCTCCAGACTCCCTGACTGTGTCTCT |
| | | | | GGGCGAGAGGACCACCATCAACTGCAAGTCCAGCCAGAGTGTTTTAGACAGCTCCAACAATAAGA |
| | | | | ACTCCTTAGCTTGGTACCAGCAGAAACCAGGACAGCCTCCTAAATTACTCCTTTCCTGGGCATCT |
| | | | | ACGCGGGAATCCGGGATCCCTGACCGATTCAGTGGCAGCGGTTCTGGGACAGATTTCACTCTCAC |
| | | | | TATTGACGGCCTGCAGCCTGAAGATTCTGCAACTTACTATTGTCAACAGTCTGCCCACTTCCCGA |
| | | | | TCACCTTTGGCCAAGGGACACGACTGGAGATTAAATCCGGAGGTGGTGGCTCCGAGGTGCAGCTG |
| | | | | GTCGAGTCTGGAGGAGGATTGGTGCAGCCTGGAGGGTCATTGAAACTCTCATGTGCAGCCTCTGG |
| | | | | ATTCACCTTCAATAGCTACGCCATGAACTGGGTCCGCCAGGCTCCAGGAAAGGGTTTGGAATGGG |
| | | | | TTGCTCGCATAAGAAGTAAATATAATAATTATGCAACATATTATGCCGATTCAGTGAAAGGCAGG |
| | | | | TTCACCATCTCCAGAGATGATTCAAAAAACACTGCCTATCTACAAATGAACAACTTGAAAACTGA |
| | | | | GGACACTGCCGTGTACTACTGTGTGAGACATGGGAACTTCGGTAATAGCTACGTTTCCTGGTGGG |
| | | | | CTTACTGGGGCCAAGGGACTCTGGTCACCGTCTCCTCAGGTGGTGGTGGTTCTGGCGGCGGCGGC |
| | | | | TCCGGTGGTGGTGGTTCTCAGACTGTTGTGACTCAGGAACCTTCACTCACCGTATCACCTGGTGG |
| | | | | AACAGTCACACTCACTTGTGGCTCCTCGACTGGGGCTGTTACATCTGGCAACTACCCAAACTGGG |
| | | | | TCCAACAAAAACCAGGTCAGGCACCCCGTGGTCTAATAGGTGGGACTAAGTTCCTCGCCCCCGGT |
| | | | | ACTCCTGCCAGATTCTCAGGCTCCCTGCTTGGAGGCAAGGCTGCCCTCACCCTCTCAGGGGTACA |
| | | | | GCCAGAGGATGAGGCAGAATATTACTGTGTTCTATGGTACAGCAACCGCTGGGTGTTCGGTGGAG |
| | | | | GAACCAAACTGACTGTCCTA |
| 297. | CD33 B10 | artificial | aa | QVQLVQSGAEVKKPGESVKVSCKASGYTFTNYGMNWVKQAPGQGLEWMGWINTYTGEPTYADKFQ |
| | HL x I2C HL | | | GRVTMTTDTSTSTAYMEIRNLRSDDTAVYYCARWSWSDGYYVYFDYWGQGTTVTVSSggggsggg |
| | | | | gsggggsDIVMTQSPDSLTVSLGERTTINCKSSQSVLDSSNNKNSLAWYQQKPGQPPKLLLSWAS |
| | | | | TRESGIPDRFSGSGSGTDFTLTIDGLQPEDSATYYCQQSAHFPITFGQGTRLEIKSGGGGSEVQL |
| | | | | VESGGGLVQPGGSLKLSCAASGFTFNKYAMNWVRQAPGKGLEWVARIRSKYNNYATYYADSVKDR |
| | | | | FTISRDDSKNTAYLQMNNLKTEDTAVYYCVRHGNFGNSYISYWAYWGQGTLVTVSSGGGGSGGGG |
| | | | | SGGGGSQTVVTQEPSLTVSPGGTVTLTCGSSTGAVTSGNYPNWVQQKPGQAPRGLIGGTKFLAPG |
| | | | | TPARFSGSLLGGKAALTLSGVQPEDEAEYYCVLWYSNRWVFGGGTKLTVL |
| 298. | CD33 B10 | artificial | nt | CAGGTGCAGCTGGTGCAGTCTGGAGCTGAGGTGAAGAAGCCTGGTGAGTCAGTCAAGGTCTCCTG |
| | HL x I2C HL | | | CAAGGCTAGCGGGTATACCTTCACAAACTATGGAATGAACTGGGTGAAGCAGGCTCCAGGACAGG |
| | | | | GTTTAGAGTGGATGGGCTGGATAAACACCTACACTGGAGAGCCAACCTATGCTGATAAGTTCCAG |
| | | | | GGACGCGTTACCATGACTACGGATACCTCTACCAGCACTGCCTATATGGAAATCCGCAACCTCAG |
| | | | | AAGTGATGACACGGCTGTATATTACTGTGCGCGCTGGAGTTGGAGTGATGGTTACTACGTTTACT |
| | | | | TTGACTACTGGGGCCAAGGCACTACGGTCACCGTCTCCTCAGGTGGTGGTGGTTCTGGCGGCGGC |
| | | | | GGCTCCGGTGGTGGTGGTTCTGACATCGTGATGACACAGTCTCCAGACTCCCTGACTGTGTCTCT |
| | | | | GGGCGAGAGGACCACCATCAACTGCAAGTCCAGCCAGAGTGTTTTAGACAGCTCCAACAATAAGA |
| | | | | ACTCCTTAGCTTGGTACCAGCAGAAACCAGGACAGCCTCCTAAATTACTCCTTTCCTGGGCATCT |
| | | | | ACGCGGGAATCCGGGATCCCTGACCGATTCAGTGGCAGCGGTTCTGGGACAGATTTCACTCTCAC |
| | | | | TATTGACGGCCTGCAGCCTGAAGATTCTGCAACTTACTATTGTCAACAGTCTGCCCACTTCCCGA |
| | | | | TCACCTTTGGCCAAGGGACACGACTGGAGATTAAATCCGGAGGTGGTGGCTCCGAGGTGCAGCTG |
| | | | | GTCGAGTCTGGAGGAGGATTGGTGCAGCCTGGAGGGTCATTGAAACTCTCATGTGCAGCCTCTGG |
| | | | | ATTCACCTTCAATAAGTACGCCATGAACTGGGTCCGCCAGGCTCCAGGAAAGGGTTTGGAATGGG |
| | | | | TTGCTCGCATAAGAAGTAAATATAATAATTATGCAACATATTATGCCGATTCAGTGAAAGACAGG |
| | | | | TTCACCATCTCCAGAGATGATTCAAAAAACACTGCCTATCTACAAATGAACAACTTGAAAACTGA |
| | | | | GGACACTGCCGTGTACTACTGTGTGAGACATGGGAACTTCGGTAATAGCTACATATCCTACTGGG |
| | | | | CTTACTGGGGCCAAGGGACTCTGGTCACCGTCTCCTCAGGTGGTGGTGGTTCTGGCGGCGGCGGC |
| | | | | TCCGGTGGTGGTGGTTCTCAGACTGTTGTGACTCAGGAACCTTCACTCACCGTATCACCTGGTGG |
| | | | | AACAGTCACACTCACTTGTGGCTCCTCGACTGGGGCTGTTACATCTGGCAACTACCCAAACTGGG |
| | | | | TCCAACAAAAACCAGGTCAGGCACCCCGTGGTCTAATAGGTGGGACTAAGTTCCTCGCCCCCGGT |
| | | | | ACTCCTGCCAGATTCTCAGGCTCCCTGCTTGGAGGCAAGGCTGCCCTCACCCTCTCAGGGGTACA |
| | | | | GCCAGAGGATGAGGCAGAATATTACTGTGTTCTATGGTACAGCAACCGCTGGGTGTTCGGTGGAG |
| | | | | GAACCAAACTGACTGTCCTA |
| 299. | CD33 E11 | artificial | aa | QVQLVQSGAEVKKPGESVKVSCKASGYTFTNYGMNWVKQAPGQGLEWMGWINTYTGEPTYADKFQ |
| | HL x H2C HL | | | GRVTMTTDTSTSTAYMEIRNLGGDDTAVYYCARWSWSDGYYVYFDYWGQGTSVTVSSggggsggg |
| | | | | gsggggsDIVMTQSPDSLTVSLGERTTINCKSSQSVLDSSTNKNSLAWYQQKPGQPPKLLLSWAS |
| | | | | TRESGIPDRFSGSGSGTDFTLTIDSPQPEDSATYYCQQSAHFPITFGQGTRLEIKSGGGGSEVQL |
| | | | | VESGGGLVQPGGSLKLSCAASGFTFNKYAMNWVRQAPGKGLEWVARIRSKYNNYATYYADSVKDR |
| | | | | FTISRDDSKNTAYLQMNNLKTEDTAVYYCVRHGNFGNSYISYWAYWGQGTLVTVSSGGGGSGGGG |
| | | | | SGGGGSQTVVTQEPSLTVSPGGTVTLTCGSSTGAVTSGYYPNWVQQKPGQAPRGLIGGTKFLAPG |
| | | | | TPARFSGSLLGGKAALTLSGVQPEDEAEYYCALWYSNRWVFGGGTKLTVL |
| 300. | CD33 E11 | artificial | nt | CAGGTGCAGCTGGTGCAGTCTGGAGCTGAGGTGAAGAAGCCTGGAGAGTCAGTCAAGGTCTCCTG |
| | HL x H2C HL | | | CAAGGCTAGCGGGTATACCTTCACAAACTATGGAATGAACTGGGTGAAGCAGGCTCCAGGACAGG |
| | | | | GTTTAGAGTGGATGGGCTGGATAAACACCTACACTGGAGAGCCAACCTATGCTGATAAGTTCCAG |
| | | | | GGACGCGTTACCATGACTACGGATACCTCTACCAGCACTGCCTATATGGAAATCCGCAACCTCGG |
| | | | | AGGTGATGACACGGCTGTATATTACTGTGCGCGCTGGAGTTGGAGTGATGGTTACTACGTTTACT |
| | | | | TTGACTACTGGGGCCAAGGCACTTCGGTCACCGTCTCCTCAGGTGGTGGTGGTTCTGGCGGCGGC |
| | | | | GGCTCCGGTGGTGGTGGTTCTGACATCGTGATGACACAGTCTCCAGACTCCCTGACTGTGTCTCT |
| | | | | GGGCGAGAGGACCACCATCAACTGCAAGTCCAGCCAGAGTGTTTTAGACAGCTCCACGAATAAGA |
| | | | | ACTCCTTAGCTTGGTACCAGCAGAAACCAGGACAGCCTCCTAAATTACTCCTTTCCTGGGCATCT |
| | | | | ACGCGGGAATCCGGGATCCCTGACCGATTCAGTGGCAGCGGGTCTGGGACAGATTTCACTCTCAC |
| | | | | TATTGACAGCCCGCAGCCTGAAGATTCTGCAACTTACTATTGTCAACAGTCTGCCCACTTCCCGA |
| | | | | TCACCTTTGGCCAAGGGACACGACTGGAGATTAAATCCGGAGGTGGTGGCTCCGAGGTGCAGCTG |
| | | | | GTCGAGTCTGGAGGAGGATTGGTGCAGCCTGGAGGGTCATTGAAACTCTCATGTGCAGCCTCTGG |
| | | | | ATTCACCTTCAATAAGTACGCCATGAACTGGGTCCGCCAGGCTCCAGGAAAGGGTTTGGAATGGG |
| | | | | TTGCTCGCATAAGAAGTAAATATAATAATTATGCAACATATTATGCCGATTCAGTGAAAGACAGG |
| | | | | TTCACCATCTCCAGAGATGATTCAAAAAACACTGCCTATCTACAAATGAACAACTTGAAAACTGA |
| | | | | GGACACTGCCGTGTACTACTGTGTGAGACATGGGAACTTCGGTAATAGCTACATATCCTACTGGG |
| | | | | CTTACTGGGGCCAAGGGACTCTGGTCACCGTCTCCTCAGGTGGTGGTGGTTCTGGCGGCGGCGGC |
| | | | | TCCGGTGGTGGTGGTTCTCAGACTGTTGTGACTCAGGAACCTTCACTCACCGTATCACCTGGTGG |
| | | | | AACAGTCACACTCACTTGTGGCTCCTCGACTGGGGCTGTTACATCTGGCTACTACCCAAACTGGG |
| | | | | TCCAACAAAAACCAGGTCAGGCACCCCGTGGTCTAATAGGTGGGACTAAGTTCCTCGCCCCCGGT |
| | | | | ACTCCTGCCAGATTCTCAGGCTCCCTGCTTGGAGGCAAGGCTGCCCTCACCCTCTCAGGGGTACA |
| | | | | GCCAGAGGATGAGGCAGAATATTACTGTGCTCTATGGTACAGCAACCGCTGGGTGTTCGGTGGAG |
| | | | | GAACCAAACTGACTGTCCTA |
| 301. | CD33 E11 HL x | artificial | aa | QVQLVQSGAEVKKPGESVKVSCKASGYTFTNYGMNWVKQAPGQGLEWMGWINTYTGEPTYADKFQ |
| | F12Q HL | | | GRVTMTTDTSTSTAYMEIRNLGGDDTAVYYCARWSWSDGYYVYFDYWGQGTSVTVSSggggsggg |
| | | | | gsggggsDIVMTQSPDSLTVSLGERTTINCKSSQSVLDSSTNKNSLAWYQQKPGQPPKLLLSWAS |
| | | | | TRESGIPDRFSGSGSGTDFTLTIDSPQPEDSATYYCQQSAHFPITFGQGTRLEIKSGGGGSEVQL |
| | | | | VESGGGLVQPGGSLKLSCAASGFTFNSYAMNWVRQAPGKGLEWVARIRSKYNNYATYYADSVKGR |
| | | | | FTISRDDSKNTAYLQMNNLKTEDTAVYYCVRHGNFGNSYVSWWAYWGQGTLVTVSSGGGGSGGGG |
| | | | | SGGGGSQTVVTQEPSLTVSPGGTVTLTCGSSTGAVTSGNYPNWVQQKPGQAPRGLIGGTKFLAPG |
| | | | | TPARFSGSLLGGKAALTLSGVQPEDEAEYYCVLWYSNRWVFGGGTKLTVL |
| 302. | CD33 E11 HL x | artificial | nt | CAGGTGCAGCTGGTGCAGTCTGGAGCTGAGGTGAAGAAGCCTGGAGAGTCAGTCAAGGTCTCCTG |
| | F12Q HL | | | CAAGGCTAGCGGGTATACCTTCACAAACTATGGAATGAACTGGGTGAAGCAGGCTCCAGGACAGG |
| | | | | GTTTAGAGTGGATGGGCTGGATAAACACCTACACTGGAGAGCCAACCTATGCTGATAAGTTCCAG |
| | | | | GGACGCGTTACCATGACTACGGATACCTCTACCAGCACTGCCTATATGGAAATCCGCAACCTCGG |
| | | | | AGGTGATGACACGGCTGTATATTACTGTGCGCGCTGGAGTTGGAGTGATGGTTACTACGTTTACT |
| | | | | TTGACTACTGGGGCCAAGGCACTTCGGTCACCGTCTCCTCAGGTGGTGGTGGTTCTGGCGGCGGC |
| | | | | GGCTCCGGTGGTGGTGGTTCTGACATCGTGATGACACAGTCTCCAGACTCCCTGACTGTGTCTCT |
| | | | | GGGCGAGAGGACCACCATCAACTGCAAGTCCAGCCAGAGTGTTTTAGACAGCTCCACGAATAAGA |
| | | | | ACTCCTTAGCTTGGTACCAGCAGAAACCAGGACAGCCTCCTAAATTACTCCTTTCCTGGGCATCT |
| | | | | ACGCGGGAATCCGGGATCCCTGACCGATTCAGTGGCAGCGGGTCTGGGACAGATTTCACTCTCAC |
| | | | | TATTGACAGCCCGCAGCCTGAAGATTCTGCAACTTACTATTGTCAACAGTCTGCCCACTTCCCGA |
| | | | | TCACCTTTGGCCAAGGGACACGACTGGAGATTAAATCCGGAGGTGGTGGCTCCGAGGTGCAGCTG |
| | | | | GTCGAGTCTGGAGGAGGATTGGTGCAGCCTGGAGGGTCATTGAAACTCTCATGTGCAGCCTCTGG |
| | | | | ATTCACCTTCAATAGCTACGCCATGAACTGGGTCCGCCAGGCTCCAGGAAAGGGTTTGGAATGGG |
| | | | | TTGCTCGCATAAGAAGTAAATATAATAATTATGCAACATATTATGCCGATTCAGTGAAAGGCAGG |
| | | | | TTCACCATCTCCAGAGATGATTCAAAAAACACTGCCTATCTACAAATGAACAACTTGAAAACTGA |
| | | | | GGACACTGCCGTGTACTACTGTGTGAGACATGGGAACTTCGGTAATAGCTACGTTTCCTGGTGGG |
| | | | | CTTACTGGGGCCAAGGGACTCTGGTCACCGTCTCCTCAGGTGGTGGTGGTTCTGGCGGCGGCGGC |
| | | | | TCCGGTGGTGGTGGTTCTCAGACTGTTGTGACTCAGGAACCTTCACTCACCGTATCACCTGGTGG |
| | | | | AACAGTCACACTCACTTGTGGCTCCTCGACTGGGGCTGTTACATCTGGCAACTACCCAAACTGGG |
| | | | | TCCAACAAAAACCAGGTCAGGCACCCCGTGGTCTAATAGGTGGGACTAAGTTCCTCGCCCCCGGT |
| | | | | ACTCCTGCCAGATTCTCAGGCTCCCTGCTTGGAGGCAAGGCTGCCCTCACCCTCTCAGGGGTACA |
| | | | | GCCAGAGGATGAGGCAGAATATTACTGTGTTCTATGGTACAGCAACCGCTGGGTGTTCGGTGGAG |
| | | | | GAACCAAACTGACTGTCCTA |
| 303. | CD33 E11 | artificial | aa | QVQLVQSGAEVKKPGESVKVSCKASGYTFTNYGMNWVKQAPGQGLEWMGWINTYTGEPTYADKFQ |
| | HL x I2C HL | | | GRVTMTTDTSTSTAYMEIRNLGGDDTAVYYCARWSWSDGYYVYFDYWGQGTSVTVSSggggsggg |
| | | | | gsggggsDIVMTQSPDSLTVSLGERTTINCKSSQSVLDSSTNKNSLAWYQQKPGQPPKLLLSWAS |
| | | | | TRESGIPDRFSGSGSGTDFTLTIDSPQPEDSATYYCQQSAHFPITFGQGTRLEIKSGGGGSEVQL |
| | | | | VESGGGLVQPGGSLKLSCAASGFTFNKYAMNWVRQAPGKGLEWVARIRSKYNNYATYYADSVKDR |
| | | | | FTISRDDSKNTAYLQMNNLKTEDTAVYYCVRHGNFGNSYISYWAYWGQGTLVTVSSGGGGSGGGG |
| | | | | SGGGGSQTVVTQEPSLTVSPGGTVTLTCGSSTGAVTSGNYPNWVQQKPGQAPRGLIGGTKFLAPG |
| | | | | TPARFSGSLLGGKAALTLSGVQPEDEAEYYCVLWYSNRWVFGGGTKLTVL |
| 304. | CD33 E11 | artificial | nt | CAGGTGCAGCTGGTGCAGTCTGGAGCTGAGGTGAAGAAGCCTGGAGAGTCAGTCAAGGTCTCCTG |
| | HL x I2C HL | | | CAAGGCTAGCGGGTATACCTTCACAAACTATGGAATGAACTGGGTGAAGCAGGCTCCAGGACAGG |
| | | | | GTTTAGAGTGGATGGGCTGGATAAACACCTACACTGGAGAGCCAACCTATGCTGATAAGTTCCAG |
| | | | | GGACGCGTTACCATGACTACGGATACCTCTACCAGCACTGCCTATATGGAAATCCGCAACCTCGG |
| | | | | AGGTGATGACACGGCTGTATATTACTGTGCGCGCTGGAGTTGGAGTGATGGTTACTACGTTTACT |
| | | | | TTGACTACTGGGGCCAAGGCACTTCGGTCACCGTCTCCTCAGGTGGTGGTGGTTCTGGCGGCGGC |
| | | | | GGCTCCGGTGGTGGTGGTTCTGACATCGTGATGACACAGTCTCCAGACTCCCTGACTGTGTCTCT |
| | | | | GGGCGAGAGGACCACCATCAACTGCAAGTCCAGCCAGAGTGTTTTAGACAGCTCCACGAATAAGA |
| | | | | ACTCCTTAGCTTGGTACCAGCAGAAACCAGGACAGCCTCCTAAATTACTCCTTTCCTGGGCATCT |
| | | | | ACGCGGGAATCCGGGATCCCTGACCGATTCAGTGGCAGCGGGTCTGGGACAGATTTCACTCTCAC |
| | | | | TATTGACAGCCCGCAGCCTGAAGATTCTGCAACTTACTATTGTCAACAGTCTGCCCACTTCCCGA |
| | | | | TCACCTTTGGCCAAGGGACACGACTGGAGATTAAATCCGGAGGTGGTGGCTCCGAGGTGCAGCTG |
| | | | | GTCGAGTCTGGAGGAGGATTGGTGCAGCCTGGAGGGTCATTGAAACTCTCATGTGCAGCCTCTGG |
| | | | | ATTCACCTTCAATAAGTACGCCATGAACTGGGTCCGCCAGGCTCCAGGAAAGGGTTTGGAATGGG |
| | | | | TTGCTCGCATAAGAAGTAAATATAATAATTATGCAACATATTATGCCGATTCAGTGAAAGACAGG |
| | | | | TTCACCATCTCCAGAGATGATTCAAAAAACACTGCCTATCTACAAATGAACAACTTGAAAACTGA |
| | | | | GGACACTGCCGTGTACTACTGTGTGAGACATGGGAACTTCGGTAATAGCTACATATCCTACTGGG |
| | | | | CTTACTGGGGCCAAGGGACTCTGGTCACCGTCTCCTCAGGTGGTGGTGGTTCTGGCGGCGGCGGC |
| | | | | TCCGGTGGTGGTGGTTCTCAGACTGTTGTGACTCAGGAACCTTCACTCACCGTATCACCTGGTGG |
| | | | | AACAGTCACACTCACTTGTGGCTCCTCGACTGGGGCTGTTACATCTGGCAACTACCCAAACTGGG |
| | | | | TCCAACAAAAACCAGGTCAGGCACCCCGTGGTCTAATAGGTGGGACTAAGTTCCTCGCCCCCGGT |
| | | | | ACTCCTGCCAGATTCTCAGGCTCCCTGCTTGGAGGCAAGGCTGCCCTCACCCTCTCAGGGGTACA |
| | | | | GCCAGAGGATGAGGCAGAATATTACTGTGTTCTATGGTACAGCAACCGCTGGGTGTTCGGTGGAG |
| | | | | GAACCAAACTGACTGTCCTA |
| 305. | CD33 | human | nt | ATGGGATGGAGCTGTATCATCCTCTTCTTGGTAGCAACAGCTACAGGTGTACACTCCGATCCAAA |
| | | | | TTTCTGGCTGCAAGTGCAGGAGTCAGTGACGGTACAGGAGGGTTTGTGCGTCCTCGTGCCCTGCA |
| | | | | CTTTCTTCCATCCCATACCCTACTACGACAAGAACTCCCCAGTTCATGGTTACTGGTTCCGGGAA |
| | | | | GGAGCCATTATATCCGGGGACTCTCCAGTGGCCACAAACAAGCTAGATCAAGAAGTACAGGAGGA |
| | | | | GACTCAGGGCAGATTCCGCCTCCTTGGGGATCCCAGTAGGAACAACTGCTCCCTGAGCATCGTAG |
| | | | | ACGCCAGGAGGAGGGATAATGGTTCATACTTCTTTCGGATGGAGAGAGGAAGTACCAAATACAGT |
| | | | | TACAAATCTCCCCAGCTCTCTGTGCATGTGACAGACTTGACCCACAGGCCCAAAATCCTCATCCC |
| | | | | TGGCACTCTAGAACCCGGCCACTCCAAAAACCTGACCTGCTCTGTGTCCTGGGCCTGTGAGCAGG |
| | | | | GAACACCCCCGATCTTCTCCTGGTTGTCAGCTGCCCCCACCTCCCTGGGCCCCAGGACTACTCAC |
| | | | | TCCTCGGTGCTCATAATCACCCCACGGCCCCAGGACCACGGCACCAACCTGACCTGTCAGGTGAA |
| | | | | GTTCGCTGGAGCTGGTGTGACTACGGAGAGAACCATCCAGCTCAACGTCACCTATGTTCCACAGA |
| | | | | ACCCAACAACTGGTATCTTTCCAGGAGATGGCTCAGGGAAACAAGAGACCAGAGCAGGAGTGGTT |
| | | | | CATGGGGCCATTGGAGGAGCTGGTGTTACAGCCCTGCTCGCTCTTTGTCTCTGCCTCATCTTCTT |
| | | | | CATAGTGAAGACCCACAGGAGGAAAGCAGCCAGGACAGCAGTGGGCAGGAATGACACCCACCCTA |
| | | | | CCACAGGGTCAGCCTCCCCGAAACACCAGAAGAAGTCCAAGTTACATGGCCCCACTGAAACCTCA |
| | | | | AGCTGTTCAGGTGCCGCCCCTACTGTGGAGATGGATGAGGAGCTGCATTATGCTTCCCTCAACTT |
| | | | | TCATGGGATGAATCCTTCCAAGGACACCTCCACCGAATACTCAGAGGTCAGGACCCAGTCCGGGC |
| | | | | ATCATCACCATCATCATTGA |
| 306. | CD33 | human | aa | MGWSCIILFLVATATGVHSDPNFWLQVQESVTVQEGLCVLVPCTFFHPIPYYDKNSPVHGYWFRE |
| | | | | GAIISGDSPVATNKLDQEVQEETQGRFRLLGDPSRNNCSLSIVDARRRDNGSYFFRMERGSTKYS |
| | | | | YKSPQLSVHVTDLTHRPKILIPGTLEPGHSKNLTCSVSWACEQGTPPIFSWLSAAPTSLGPRTTH |
| | | | | SSVLIITPRPQDHGTNLTCQVKFAGAGVTTERTIQLNVTYVPQNPTTGIFPGDGSGKQETRAGVV |
| | | | | HGAIGGAGVTALLALCLCLIFFIVKTHRRKAARTAVGRNDTHPTTGSASPKHQKKSKLHGPTETS |
| | | | | SCSGAAPTVEMDEELHYASLNFHGMNPSKDTSTEYSEVRTQSGHHHHHH |
| 307. | CD33 | macaque | nt | ATGCCGCTGCTGCTACTGCTGCCCCTGCTGTGGGCAGGGGCCCTGGCTATGGATCCAAGAGTCAG |
| | | | | GCTGGAAGTGCAGGAGTCAGTGACAGTACAGGAGGGTTTGTGCGTCCTTGTGCCCTGCACTTTCT |
| | | | | TCCATCCCGTACCCTACCACACCAGGAATTCCCCAGTTCATGGTTACTGGTTCCGGGAAGGAGCC |
| | | | | ATTGTATCCTTGGACTCTCCAGTGGCCACAAACAAGCTAGATCAAGAAGTACAGGAGGAGACCCA |
| | | | | GGGCCGATTCCGCCTCCTTGGGGATCCCAGTAGGAACAACTGCTCCCTGAGCATCGTAGATGCCA |
| | | | | GGAGGAGGGATAACGGTTCATACTTCTTTCGGATGGAGAAAGGAAGTACCAAATACAGTTACAAA |
| | | | | TCTACCCAGCTCTCTGTGCATGTGACAGACTTGACCCACAGGCCCCAAATCCTCATCCCTGGAGC |
| | | | | CCTAGACCCTGACCACTCCAAAAACCTGACCTGCTCTGTGCCCTGGGCCTGTGAGCAGGGAACAC |
| | | | | CTCCAATCTTCTCCTGGATGTCAGCTGCCCCCACCTCCCTGGGCCTCAGGACCACTCACTCCTCG |
| | | | | GTGCTCATAATCACCCCACGGCCCCAGGACCACGGCACCAACCTCACCTGTCAGGTGAAGTTCCC |
| | | | | TGGAGCTGGCGTGACCACGGAGAGAACCATCCAGCTCAATGTCTCCTATGCTTCACAGAACCCAA |
| | | | | GAACTGATATCTTTCTAGGAGACGGCTCAGGGAAACAAGGAGTGGTTCAGGGAGCCATCGGGGGA |
| | | | | GCTGGTGTCACAGTCCTGCTCGCTCTTTGTCTCTGCCTCATCTTCTTCACAGTGAAGACTCACAG |
| | | | | GAGGAAAGCAGCCAGGACAGCAGTGGGCAGGATCGACACCCACCCCGCCACAGGGCCAACATCCT |
| | | | | CGAAACACCAGAAGAAGTCCAAGTTACATGGCGCCACTGAAACCTCAGGCTGTTCAGGTACCACC |
| | | | | CTTACTGTGGAGATGGATGAGGAGCTGCACTACGCTTCCCTCAACTTTCATGGGATGAATCCTTC |
| | | | | TGAGGACACCTCCACCGAATACTCAGAGGTCAGGACCCAGTGA |
| 308. | CD33 | macaque | aa | MPLLLLLPLLWAGALAMDPRVRLEVQESVTVQEGLCVLVPCTFFHPVPYHTRNSPVHGYWFREGA |
| | | | | IVSLDSPVATNKLDQEVQEETQGRFRLLGDPSRNNCSLSIVDARRRDNGSYFFRMEKGSTKYSYK |
| | | | | STQLSVHVTDLTHRPQILIPGALDPDHSKNLTCSVPWACEQGTPPIFSWMSAAPTSLGLRTTHSS |
| | | | | VLIITPRPQDHGTNLTCQVKFPGAGVTTERTIQLNVSYASQNPRTDIFLGDGSGKQGVVQGAIGG |
| | | | | AGVTVLLALCLCLIFFTVKTHRRKAARTAVGRIDTHPATGPTSSKHQKKSKLHGATETSGCSGTT |
| | | | | LTVEMDEELHYASLNFHGMNPSEDTSTEYSEVRTQ |
| 309. | 1-27 CD3-Fc + | artificial | nt | ATGGGATGGAGCTGTATCATCCTCTTCTTGGTAGCAACAGCTACAGGTGTACACTCCCAAGATGG |
| | Leader | | | TAATGAAGAAATGGGTGGTATTACACAGACACCATATAAAGTCTCCATCTCTGGAACCACAGTAA |
| | | | | TATTGACATCCGGAGAGCCCAAATCTTGTGACAAAACTCACACATGCCCACCGTGCCCAGCACCT |
| | | | | GAACTCCTGGGGGGACCGTCAGTCTTCCTCTTCCCCCCAAAACCCAAGGACACCCTCATGATCTC |
| | | | | CCGGACCCCTGAGGTCACATGCGTGGTGGTGGACGTGAGCCACGAAGACCCTGAGGTCAAGTTCA |
| | | | | ACTGGTACGTGGACGGCGTGGAGGTGCATAATGCCAAGACAAAGCCGCGGGAGGAGCAGTACAAC |
| | | | | AGCACGTACCGTGTGGTCAGCGTCCTCACCGTCCTGCACCAGGACTGGCTGAATGGCAAGGAGTA |
| | | | | CAAGTGCAAGGTCTCCAACAAAGCCCTCCCAGCCCCCATCGAGAAAACCATCTCCAAAGCCAAAG |
| | | | | GGCAGCCCCGAGAACCACAGGTGTACACCCTGCCCCCATCCCGGGAGGAGATGACCAAGAACCAG |
| | | | | GTCAGCCTGACCTGCCTGGTCAAAGGCTTCTATCCCAGCGACATCGCCGTGGAGTGGGAGAGCAA |
| | | | | TGGGCAGCCGGAGAACAACTACAAGACCACGCCTCCCGTGCTGGACTCCGACGGCTCCTTCTTCC |
| | | | | TCTATAGCAAGCTCACCGTGGACAAGAGCAGGTGGCAGCAGGGGAACGTCTTCTCATGCTCCGTG |
| | | | | ATGCATGAGGCTCTGCACAACCACTACACGCAGAAGAGCCTCTCCCTGTCCCCGGGTAAATAG |
| 310. | 1-27 CD3-Fc + | artificial | aa | MGWSCIILFLVATATGVHSQDGNEEMGGITQTPYKVSISGTTVILTSGEPKSCDKTHTCPPCPAP |
| | Leader | | | ELLGGPSVFLFPPKPKDTLMISRTPEVTCVVVDVSHEDPEVKFNWYVDGVEVHNAKTKPREEQYN |
| | | | | STYRVVSVLTVLHQDWLNGKEYKCKVSNKALPAPIEKTISKAKGQPREPQVYTLPPSREEMTKNQ |
| | | | | VSLTCLVKGFYPSDIAVEWESNGQPENNYKTTPPVLDSDGSFFLYSKLTVDKSRWQQGNVFSCSV |
| | | | | MHEALHNHYTQKSLSLSPGK |
| 311. | CD33 UD H2C | artificial | aa | EVQLVESGGGLVQPGGSLKLSCAASGFTFNKYAMNWVRQAPGKGLEWVARIRSKYNNYATYYADS |
| | HL x AF5 HL | | | VKDRFTISRDDSKNTAYLQMNNLKTEDTAVYYCVRHGNFGNSYISYWAYWGQGTLVTVSSGGGGS |
| | | | | GGGGSGGGGSQTVVTQEPSLTVSPGGTVTLTCGSSTGAVTSGYYPNWVQQKPGQAPRGLIGGTKF |
| | | | | LAPGTPARFSGSLLGGKAALTLSGVQPEDEAEYYCALWYSNRWVFGGGTKLTVLSGGGGSQVQLV |
| | | | | QSGAEVKKPGASVKVSCKASGYTFTNYGMNWVKQAPGQGLKWMGWINTYTGEPTYADDFKGRVTM |
| | | | | TSDTSTSTAYLELHNLRSDDTAVYYCARWSWSDGYYVYFDYWGQGTTVTVSSGGGGSGGGGSGGG |
| | | | | GSDIVMTQSPDSLTVSLGERTTINCKSSQSVLDSSKNKNSLAWYQQKPGQPPKLLLSWASTRESG |
| | | | | IPDRFSGSGSGTDFTLTIDSLQPEDSATYYCQQSAHFPITFGQGTRLEIK |
| 312. | CD33 UD H2C | artificial | nt | GAGGTGCAGCTGGTCGAGTCTGGAGGAGGATTGGTGCAGCCTGGAGGGTCATTGAAACTCTCATG |
| | HL x AF5 HL | | | TGCAGCCTCTGGATTCACCTTCAATAAGTACGCCATGAACTGGGTCCGCCAGGCTCCAGGAAAGG |
| | | | | GTTTGGAATGGGTTGCTCGCATAAGAAGTAAATATAATAATTATGCAACATATTATGCCGATTCA |
| | | | | GTGAAAGACAGGTTCACCATCTCCAGAGATGATTCAAAAAACACTGCCTATCTACAAATGAACAA |
| | | | | CTTGAAAACTGAGGACACTGCCGTGTACTACTGTGTGAGACATGGGAACTTCGGTAATAGCTACA |
| | | | | TATCCTACTGGGCTTACTGGGGCCAAGGGACTCTGGTCACCGTCTCCTCAGGTGGTGGTGGTTCT |
| | | | | GGCGGCGGCGGCTCCGGTGGTGGTGGTTCTCAGACTGTTGTGACTCAGGAACCTTCACTCACCGT |
| | | | | ATCACCTGGTGGAACAGTCACACTCACTTGTGGCTCCTCGACTGGGGCTGTTACATCTGGCTACT |
| | | | | ACCCAAACTGGGTCCAACAAAAACCAGGTCAGGCACCCCGTGGTCTAATAGGTGGGACTAAGTTC |
| | | | | CTCGCCCCCGGTACTCCTGCCAGATTCTCAGGCTCCCTGCTTGGAGGCAAGGCTGCCCTCACCCT |
| | | | | CTCAGGGGTACAGCCAGAGGATGAGGCAGAATATTACTGTGCTCTATGGTACAGCAACCGCTGGG |
| | | | | TGTTCGGTGGAGGAACCAAACTGACTGTCCTATCCGGAGGTGGTGGCTCCCAGGTGCAGCTGGTC |
| | | | | CAGTCTGGAGCTGAGGTGAAGAAGCCTGGAGCGTCAGTCAAGGTCTCCTGCAAGGCTAGCGGGTA |
| | | | | TACCTTCACAAACTATGGAATGAACTGGGTGAAGCAGGCTCCAGGACAGGGTTTAAAGTGGATGG |
| | | | | GCTGGATAAACACCTACACTGGAGAGCCAACATATGCTGATGACTTCAAGGGACGGGTTACCATG |
| | | | | ACTTCGGATACCTCTACCAGCACTGCCTATTTGGAACTCCACAACCTCAGAAGTGATGACACGGC |
| | | | | TGTATATTACTGTGCGCGCTGGAGTTGGAGTGATGGTTACTACGTTTACTTTGACTACTGGGGCC |
| | | | | AAGGCACTACGGTCACCGTCTCCTCAGGTGGTGGTGGTTCTGGCGGCGGCGGCTCCGGTGGTGGT |
| | | | | GGTTCTGACATCGTGATGACACAGTCTCCAGACTCCCTGACTGTGTCTCTGGGCGAGAGGACCAC |
| | | | | CATCAACTGCAAGTCCAGCCAGAGTGTTTTAGACAGCTCCAAGAATAAGAACTCCTTAGCTTGGT |
| | | | | ACCAGCAGAAACCAGGACAGCCTCCTAAATTACTCCTTTCCTGGGCATCTACGCGGGAATCCGGG |
| | | | | ATCCCTGACCGATTCAGTGGCAGCGGGTCTGGGACAGATTTCACTCTCACTATTGACAGCCTGCA |
| | | | | GCCTGAAGATTCTGCAACTTACTATTGTCAACAGTCTGCCCACTTCCCGATCACCTTTGGCCAAG |
| | | | | GGACACGACTGGAGATTAAA |
| 313. | CD33 UD F12Q | artificial | aa | EVQLVESGGGLVQPGGSLKLSCAASGFTFNSYAMNWVRQAPGKGLEWVARIRSKYNNYATYYADS |
| | HL x AF5 HL | | | VKGRFTISRDDSKNTAYLQMNNLKTEDTAVYYCVRHGNFGNSYVSWWAYWGQGTLVTVSSGGGGS |
| | | | | GGGGSGGGGSQTVVTQEPSLTVSPGGTVTLTCGSSTGAVTSGNYPNWVQQKPGQAPRGLIGGTKF |
| | | | | LAPGTPARFSGSLLGGKAALTLSGVQPEDEAEYYCVLWYSNRWVFGGGTKLTVLSGGGGSQVQLV |
| | | | | QSGAEVKKPGASVKVSCKASGYTFTNYGMNWVKQAPGQGLKWMGWINTYTGEPTYADDFKGRVTM |
| | | | | TSDTSTSTAYLELHNLRSDDTAVYYCARWSWSDGYYVYFDYWGQGTTVTVSSGGGGSGGGGSGGG |
| | | | | GSDIVMTQSPDSLTVSLGERTTINCKSSQSVLDSSKNKNSLAWYQQKPGQPPKLLLSWASTRESG |
| | | | | IPDRFSGSGSGTDFTLTIDSLQPEDSATYYCQQSAHFPITFGQGTRLEIK |
| 314. | CD33 UD F12Q | artificial | nt | GAGGTGCAGCTGGTCGAGTCTGGAGGAGGATTGGTGCAGCCTGGAGGGTCATTGAAACTCTCATG |
| | HL x AF5 HL | | | TGCAGCCTCTGGATTCACCTTCAATAGCTACGCCATGAACTGGGTCCGCCAGGCTCCAGGAAAGG |
| | | | | GTTTGGAATGGGTTGCTCGCATAAGAAGTAAATATAATAATTATGCAACATATTATGCCGATTCA |
| | | | | GTGAAAGGCAGGTTCACCATCTCCAGAGATGATTCAAAAAACACTGCCTATCTACAAATGAACAA |
| | | | | CTTGAAAACTGAGGACACTGCCGTGTACTACTGTGTGAGACATGGGAACTTCGGTAATAGCTACG |
| | | | | TTTCCTGGTGGGCTTACTGGGGCCAAGGGACTCTGGTCACCGTCTCCTCAGGTGGTGGTGGTTCT |
| | | | | GGCGGCGGCGGCTCCGGTGGTGGTGGTTCTCAGACTGTTGTGACTCAGGAACCTTCACTCACCGT |
| | | | | ATCACCTGGTGGAACAGTCACACTCACTTGTGGCTCCTCGACTGGGGCTGTTACATCTGGCAACT |
| | | | | ACCCAAACTGGGTCCAACAAAAACCAGGTCAGGCACCCCGTGGTCTAATAGGTGGGACTAAGTTC |
| | | | | CTCGCCCCCGGTACTCCTGCCAGATTCTCAGGCTCCCTGCTTGGAGGCAAGGCTGCCCTCACCCT |
| | | | | CTCAGGGGTACAGCCAGAGGATGAGGCAGAATATTACTGTGTTCTATGGTACAGCAACCGCTGGG |
| | | | | TGTTCGGTGGAGGAACCAAACTGACTGTCCTATCCGGAGGTGGTGGCTCCCAGGTGCAGCTGGTC |
| | | | | CAGTCTGGAGCTGAGGTGAAGAAGCCTGGAGCGTCAGTCAAGGTCTCCTGCAAGGCTAGCGGGTA |
| | | | | TACCTTCACAAACTATGGAATGAACTGGGTGAAGCAGGCTCCAGGACAGGGTTTAAAGTGGATGG |
| | | | | GCTGGATAAACACCTACACTGGAGAGCCAACATATGCTGATGACTTCAAGGGACGGGTTACCATG |
| | | | | ACTTCGGATACCTCTACCAGCACTGCCTATTTGGAACTCCACAACCTCAGAAGTGATGACACGGC |
| | | | | TGTATATTACTGTGCGCGCTGGAGTTGGAGTGATGGTTACTACGTTTACTTTGACTACTGGGGCC |
| | | | | AAGGCACTACGGTCACCGTCTCCTCAGGTGGTGGTGGTTCTGGCGGCGGCGGCTCCGGTGGTGGT |
| | | | | GGTTCTGACATCGTGATGACACAGTCTCCAGACTCCCTGACTGTGTCTCTGGGCGAGAGGACCAC |
| | | | | CATCAACTGCAAGTCCAGCCAGAGTGTTTTAGACAGCTCCAAGAATAAGAACTCCTTAGCTTGGT |
| | | | | ACCAGCAGAAACCAGGACAGCCTCCTAAATTACTCCTTTCCTGGGCATCTACGCGGGAATCCGGG |
| | | | | ATCCCTGACCGATTCAGTGGCAGCGGGTCTGGGACAGATTTCACTCTCACTATTGACAGCCTGCA |
| | | | | GCCTGAAGATTCTGCAACTTACTATTGTCAACAGTCTGCCCACTTCCCGATCACCTTTGGCCAAG |
| | | | | GGACACGACTGGAGATTAAA |
| 315. | CD33 UD I2C | artificial | aa | EVQLVESGGGLVQPGGSLKLSCAASGFTFNKYAMNWVRQAPGKGLEWVARIRSKYNNYATYYADS |
| | HL x AF5 HL | | | VKDRFTISRDDSKNTAYLQMNNLKTEDTAVYYCVRHGNFGNSYISYWAYWGQGTLVTVSSGGGGS |
| | | | | GGGGSGGGGSQTVVTQEPSLTVSPGGTVTLTCGSSTGAVTSGNYPNWVQQKPGQAPRGLIGGTKF |
| | | | | LAPGTPARFSGSLLGGKAALTLSGVQPEDEAEYYCVLWYSNRWVFGGGTKLTVLSGGGGSQVQLV |
| | | | | QSGAEVKKPGASVKVSCKASGYTFTNYGMNWVKQAPGQGLKWMGWINTYTGEPTYADDFKGRVTM |
| | | | | TSDTSTSTAYLELHNLRSDDTAVYYCARWSWSDGYYVYFDYWGQGTTVTVSSGGGGSGGGGSGGG |
| | | | | GSDIVMTQSPDSLTVSLGERTTINCKSSQSVLDSSKNKNSLAWYQQKPGQPPKLLLSWASTRESG |
| | | | | IPDRFSGSGSGTDFTLTIDSLQPEDSATYYCQQSAHFPITFGQGTRLEIK |
| 316. | CD33 UD I2C | artificial | nt | GAGGTGCAGCTGGTCGAGTCTGGAGGAGGATTGGTGCAGCCTGGAGGGTCATTGAAACTCTCATG |
| | HL x AF5 HL | | | TGCAGCCTCTGGATTCACCTTCAATAAGTACGCCATGAACTGGGTCCGCCAGGCTCCAGGAAAGG |
| | | | | GTTTGGAATGGGTTGCTCGCATAAGAAGTAAATATAATAATTATGCAACATATTATGCCGATTCA |
| | | | | GTGAAAGACAGGTTCACCATCTCCAGAGATGATTCAAAAAACACTGCCTATCTACAAATGAACAA |
| | | | | CTTGAAAACTGAGGACACTGCCGTGTACTACTGTGTGAGACATGGGAACTTCGGTAATAGCTACA |
| | | | | TATCCTACTGGGCTTACTGGGGCCAAGGGACTCTGGTCACCGTCTCCTCAGGTGGTGGTGGTTCT |
| | | | | GGCGGCGGCGGCTCCGGTGGTGGTGGTTCTCAGACTGTTGTGACTCAGGAACCTTCACTCACCGT |
| | | | | ATCACCTGGTGGAACAGTCACACTCACTTGTGGCTCCTCGACTGGGGCTGTTACATCTGGCAACT |
| | | | | ACCCAAACTGGGTCCAACAAAAACCAGGTCAGGCACCCCGTGGTCTAATAGGTGGGACTAAGTTC |
| | | | | CTCGCCCCCGGTACTCCTGCCAGATTCTCAGGCTCCCTGCTTGGAGGCAAGGCTGCCCTCACCCT |
| | | | | CTCAGGGGTACAGCCAGAGGATGAGGCAGAATATTACTGTGTTCTATGGTACAGCAACCGCTGGG |
| | | | | TGTTCGGTGGAGGAACCAAACTGACTGTCCTATCCGGAGGTGGTGGCTCCCAGGTGCAGCTGGTC |
| | | | | CAGTCTGGAGCTGAGGTGAAGAAGCCTGGAGCGTCAGTCAAGGTCTCCTGCAAGGCTAGCGGGTA |
| | | | | TACCTTCACAAACTATGGAATGAACTGGGTGAAGCAGGCTCCAGGACAGGGTTTAAAGTGGATGG |
| | | | | GCTGGATAAACACCTACACTGGAGAGCCAACATATGCTGATGACTTCAAGGGACGGGTTACCATG |
| | | | | ACTTCGGATACCTCTACCAGCACTGCCTATTTGGAACTCCACAACCTCAGAAGTGATGACACGGC |
| | | | | TGTATATTACTGTGCGCGCTGGAGTTGGAGTGATGGTTACTACGTTTACTTTGACTACTGGGGCC |
| | | | | AAGGCACTACGGTCACCGTCTCCTCAGGTGGTGGTGGTTCTGGCGGCGGCGGCTCCGGTGGTGGT |
| | | | | GGTTCTGACATCGTGATGACACAGTCTCCAGACTCCCTGACTGTGTCTCTGGGCGAGAGGACCAC |
| | | | | CATCAACTGCAAGTCCAGCCAGAGTGTTTTAGACAGCTCCAAGAATAAGAACTCCTTAGCTTGGT |
| | | | | ACCAGCAGAAACCAGGACAGCCTCCTAAATTACTCCTTTCCTGGGCATCTACGCGGGAATCCGGG |
| | | | | ATCCCTGACCGATTCAGTGGCAGCGGGTCTGGGACAGATTTCACTCTCACTATTGACAGCCTGCA |
| | | | | GCCTGAAGATTCTGCAACTTACTATTGTCAACAGTCTGCCCACTTCCCGATCACCTTTGGCCAAG |
| | | | | GGACACGACTGGAGATTAAA |
| 317. | MCSP-A9 | artificial | aa | QVQLVQSGAEVKKPGASVKVSCKASGYPFTGYYMHWVRQAPGQGLEWMGWINPNSGGTNYAQKFQ |
| | HL x H2C HL | | | GRVTITADESTSTAYMELSRLRSDDTAVYYCAKSWVSWFASWGQGTLVTVSSGGGGSGGGGSGGG |
| | | | | GSDIVMTQSPDSLAVSLGERATINCKSSQSVLSSSNNKNYLNWYQQKPGQPPKLLIYWASTRESG |
| | | | | VPDRFSGSGSGTDFTLTISSLQAEDVAVYYCQQHFNTPFAFGQGTKLEIKSGGGGSEVQLVESGG |
| | | | | GLVQPGGSLKLSCAASGFTFNKYAMNWVRQAPGKGLEWVARIRSKYNNYATYYADSVKDRFTISR |
| | | | | DDSKNTAYLQMNNLKTEDTAVYYCVRHGNFGNSYISYWAYWGQGTLVTVSSGGGGSGGGGSGGGG |
| | | | | SQTVVTQEPSLTVSPGGTVTLTCGSSTGAVTSGYYPNWVQQKPGQAPRGLIGGTKFLAPGTPARF |
| | | | | SGSLLGGKAALTLSGVQPEDEAEYYCALWYSNRWVFGGGTKLTVL |
| 318. | MCSP-A9 | artificial | nt | CAGGTGCAGCTGGTCCAGTCTGGGGCTGAGGTGAAGAAGCCTGGGGCCTCAGTGAAGGTCTCCTG |
| | HL x H2C HL | | | CAAGGCTTCTGGATACCCCTTCACCGGCTACTACATGCACTGGGTGCGACAGGCCCCTGGACAAG |
| | | | | GGCTTGAGTGGATGGGATGGATCAACCCTAACAGTGGTGGCACAAACTATGCACAGAAGTTTCAG |
| | | | | GGCAGAGTCACGATTACCGCGGACGAATCCACGAGCACAGCCTACATGGAGCTGAGCAGGCTGAG |
| | | | | ATCTGACGACACGGCCGTGTATTACTGTGCGAAATCCTGGGTCTCCTGGTTTGCTTCCTGGGGTC |
| | | | | AAGGAACCTTGGTCACCGTCTCCTCAGGTGGTGGTGGTTCTGGCGGCGGCGGCTCCGGTGGTGGT |
| | | | | GGTTCTGACATCGTGATGACACAGTCTCCAGACTCCCTGGCTGTGTCTCTGGGCGAGAGGGCCAC |
| | | | | CATCAACTGCAAGTCCAGCCAGAGTGTCTTATCCAGCTCCAACAATAAGAACTACTTAAATTGGT |
| | | | | ACCAGCAGAAACCAGGACAGCCTCCTAAGTTGCTCATTTACTGGGCATCTACCCGGGAATCCGGG |
| | | | | GTCCCTGACCGATTCAGTGGCAGCGGGTCTGGGACAGATTTCACTCTCACCATCAGCAGCCTGCA |
| | | | | GGCTGAAGATGTGGCGGTTTATTACTGTCAACAACATTTTAATACTCCGTTCGCTTTTGGCCAGG |
| | | | | GGACCAAGCTGGAGATCAAATCCGGAGGTGGTGGATCCGAGGTGCAGCTGGTCGAGTCTGGAGGA |
| | | | | GGATTGGTGCAGCCTGGAGGGTCATTGAAACTCTCATGTGCAGCCTCTGGATTCACCTTCAATAA |
| | | | | GTACGCCATGAACTGGGTCCGCCAGGCTCCAGGAAAGGGTTTGGAATGGGTTGCTCGCATAAGAA |
| | | | | GTAAATATAATAATTATGCAACATATTATGCCGATTCAGTGAAAGACAGGTTCACCATCTCCAGA |
| | | | | GATGATTCAAAAAACACTGCCTATCTACAAATGAACAACTTGAAAACTGAGGACACTGCCGTGTA |
| | | | | CTACTGTGTGAGACATGGGAACTTCGGTAATAGCTACATATCCTACTGGGCTTACTGGGGCCAAG |
| | | | | GGACTCTGGTCACCGTCTCCTCAGGTGGTGGTGGTTCTGGCGGCGGCGGCTCCGGTGGTGGTGGT |
| | | | | TCTCAGACTGTTGTGACTCAGGAACCTTCACTCACCGTATCACCTGGTGGAACAGTCACACTCAC |
| | | | | TTGTGGCTCCTCGACTGGGGCTGTTACATCTGGCTACTACCCAAACTGGGTCCAACAAAAACCAG |
| | | | | GTCAGGCACCCCGTGGTCTAATAGGTGGGACTAAGTTCCTCGCCCCCGGTACTCCTGCCAGATTC |
| | | | | TCAGGCTCCCTGCTTGGAGGCAAGGCTGCCCTCACCCTCTCAGGGGTACAGCCAGAGGATGAGGC |
| | | | | AGAATATTACTGTGCTCTATGGTACAGCAACCGCTGGGTGTTCGGTGGAGGAACCAAACTGACTG |
| | | | | TCCTA |
| 319. | MCSP-A9 HL x | artificial | aa | QVQLVQSGAEVKKPGASVKVSCKASGYPFTGYYMHWVRQAPGQGLEWMGWINPNSGGTNYAQKFQ |
| | F12Q HL | | | GRVTITADESTSTAYMELSRLRSDDTAVYYCAKSWVSWFASWGQGTLVTVSSGGGGSGGGGSGGG |
| | | | | GSDIVMTQSPDSLAVSLGERATINCKSSQSVLSSSNNKNYLNWYQQKPGQPPKLLIYWASTRESG |
| | | | | VPDRFSGSGSGTDFTLTISSLQAEDVAVYYCQQHFNTPFAFGQGTKLEIKSGGGGSEVQLVESGG |
| | | | | GLVQPGGSLKLSCAASGFTFNSYAMNWVRQAPGKGLEWVARIRSKYNNYATYYADSVKGRFTISR |
| | | | | DDSKNTAYLQMNNLKTEDTAVYYCVRHGNFGNSYVSWWAYWGQGTLVTVSSGGGGSGGGGSGGGG |
| | | | | SQTVVTQEPSLTVSPGGTVTLTCGSSTGAVTSGNYPNWVQQKPGQAPRGLIGGTKFLAPGTPARF |
| | | | | SGSLLGGKAALTLSGVQPEDEAEYYCVLWYSNRWVFGGGTKLTVL |
| 320. | MCSP-A9 HL x | artificial | nt | CAGGTGCAGCTGGTCCAGTCTGGGGCTGAGGTGAAGAAGCCTGGGGCCTCAGTGAAGGTCTCCTG |
| | F12Q HL | | | CAAGGCTTCTGGATACCCCTTCACCGGCTACTACATGCACTGGGTGCGACAGGCCCCTGGACAAG |
| | | | | GGCTTGAGTGGATGGGATGGATCAACCCTAACAGTGGTGGCACAAACTATGCACAGAAGTTTCAG |
| | | | | GGCAGAGTCACGATTACCGCGGACGAATCCACGAGCACAGCCTACATGGAGCTGAGCAGGCTGAG |
| | | | | ATCTGACGACACGGCCGTGTATTACTGTGCGAAATCCTGGGTCTCCTGGTTTGCTTCCTGGGGTC |
| | | | | AAGGAACCTTGGTCACCGTCTCCTCAGGTGGTGGTGGTTCTGGCGGCGGCGGCTCCGGTGGTGGT |
| | | | | GGTTCTGACATCGTGATGACACAGTCTCCAGACTCCCTGGCTGTGTCTCTGGGCGAGAGGGCCAC |
| | | | | CATCAACTGCAAGTCCAGCCAGAGTGTCTTATCCAGCTCCAACAATAAGAACTACTTAAATTGGT |
| | | | | ACCAGCAGAAACCAGGACAGCCTCCTAAGTTGCTCATTTACTGGGCATCTACCCGGGAATCCGGG |
| | | | | GTCCCTGACCGATTCAGTGGCAGCGGGTCTGGGACAGATTTCACTCTCACCATCAGCAGCCTGCA |
| | | | | GGCTGAAGATGTGGCGGTTTATTACTGTCAACAACATTTTAATACTCCGTTCGCTTTTGGCCAGG |
| | | | | GGACCAAGCTGGAGATCAAATCCGGAGGTGGTGGATCCGAGGTGCAGCTGGTCGAGTCTGGAGGA |
| | | | | GGATTGGTGCAGCCTGGAGGGTCATTGAAACTCTCATGTGCAGCCTCTGGATTCACCTTCAATAG |
| | | | | CTACGCCATGAACTGGGTCCGCCAGGCTCCAGGAAAGGGTTTGGAATGGGTTGCTCGCATAAGAA |
| | | | | GTAAATATAATAATTATGCAACATATTATGCCGATTCAGTGAAAGGCAGGTTCACCATCTCCAGA |
| | | | | GATGATTCAAAAAACACTGCCTATCTACAAATGAACAACTTGAAAACTGAGGACACTGCCGTGTA |
| | | | | CTACTGTGTGAGACATGGGAACTTCGGTAATAGCTACGTTTCCTGGTGGGCTTACTGGGGCCAAG |
| | | | | GGACTCTGGTCACCGTCTCCTCAGGTGGTGGTGGTTCTGGCGGCGGCGGCTCCGGTGGTGGTGGT |
| | | | | TCTCAGACTGTTGTGACTCAGGAACCTTCACTCACCGTATCACCTGGTGGAACAGTCACACTCAC |
| | | | | TTGTGGCTCCTCGACTGGGGCTGTTACATCTGGCAACTACCCAAACTGGGTCCAACAAAAACCAG |
| | | | | GTCAGGCACCCCGTGGTCTAATAGGTGGGACTAAGTTCCTCGCCCCCGGTACTCCTGCCAGATTC |
| | | | | TCAGGCTCCCTGCTTGGAGGCAAGGCTGCCCTCACCCTCTCAGGGGTACAGCCAGAGGATGAGGC |
| | | | | AGAATATTACTGTGTTCTATGGTACAGCAACCGCTGGGTGTTCGGTGGAGGAACCAAACTGACTG |
| | | | | TCCTA |
| 321. | MCSP-A9 | artificial | aa | QVQLVQSGAEVKKPGASVKVSCKASGYPFTGYYMHWVRQAPGQGLEWMGWINPNSGGTNYAQKFQ |
| | HL x I2C HL | | | GRVTITADESTSTAYMELSRLRSDDTAVYYCAKSWVSWFASWGQGTLVTVSSGGGGSGGGGSGGG |
| | | | | GSDIVMTQSPDSLAVSLGERATINCKSSQSVLSSSNNKNYLNWYQQKPGQPPKLLIYWASTRESG |
| | | | | VPDRFSGSGSGTDFTLTISSLQAEDVAVYYCQQHFNTPFAFGQGTKLEIKSGGGGSEVQLVESGG |
| | | | | GLVQPGGSLKLSCAASGFTFNKYAMNWVRQAPGKGLEWVARIRSKYNNYATYYADSVKDRFTISR |
| | | | | DDSKNTAYLQMNNLKTEDTAVYYCVRHGNFGNSYISYWAYWGQGTLVTVSSGGGGSGGGGSGGGG |
| | | | | SQTVVTQEPSLTVSPGGTVTLTCGSSTGAVTSGNYPNWVQQKPGQAPRGLIGGTKFLAPGTPARF |
| | | | | SGSLLGGKAALTLSGVQPEDEAEYYCVLWYSNRWVFGGGTKLTVL |
| 322. | MCSP-A9 | artificial | nt | CAGGTGCAGCTGGTCCAGTCTGGGGCTGAGGTGAAGAAGCCTGGGGCCTCAGTGAAGGTCTCCTG |
| | HL x I2C HL | | | CAAGGCTTCTGGATACCCCTTCACCGGCTACTACATGCACTGGGTGCGACAGGCCCCTGGACAAG |
| | | | | GGCTTGAGTGGATGGGATGGATCAACCCTAACAGTGGTGGCACAAACTATGCACAGAAGTTTCAG |
| | | | | GGCAGAGTCACGATTACCGCGGACGAATCCACGAGCACAGCCTACATGGAGCTGAGCAGGCTGAG |
| | | | | ATCTGACGACACGGCCGTGTATTACTGTGCGAAATCCTGGGTCTCCTGGTTTGCTTCCTGGGGTC |
| | | | | AAGGAACCTTGGTCACCGTCTCCTCAGGTGGTGGTGGTTCTGGCGGCGGCGGCTCCGGTGGTGGT |
| | | | | GGTTCTGACATCGTGATGACACAGTCTCCAGACTCCCTGGCTGTGTCTCTGGGCGAGAGGGCCAC |
| | | | | CATCAACTGCAAGTCCAGCCAGAGTGTCTTATCCAGCTCCAACAATAAGAACTACTTAAATTGGT |
| | | | | ACCAGCAGAAACCAGGACAGCCTCCTAAGTTGCTCATTTACTGGGCATCTACCCGGGAATCCGGG |
| | | | | GTCCCTGACCGATTCAGTGGCAGCGGGTCTGGGACAGATTTCACTCTCACCATCAGCAGCCTGCA |
| | | | | GGCTGAAGATGTGGCGGTTTATTACTGTCAACAACATTTTAATACTCCGTTCGCTTTTGGCCAGG |
| | | | | GGACCAAGCTGGAGATCAAATCCGGAGGTGGTGGATCCGAGGTGCAGCTGGTCGAGTCTGGAGGA |
| | | | | GGATTGGTGCAGCCTGGAGGGTCATTGAAACTCTCATGTGCAGCCTCTGGATTCACCTTCAATAA |
| | | | | GTACGCCATGAACTGGGTCCGCCAGGCTCCAGGAAAGGGTTTGGAATGGGTTGCTCGCATAAGAA |
| | | | | GTAAATATAATAATTATGCAACATATTATGCCGATTCAGTGAAAGACAGGTTCACCATCTCCAGA |
| | | | | GATGATTCAAAAAACACTGCCTATCTACAAATGAACAACTTGAAAACTGAGGACACTGCCGTGTA |
| | | | | CTACTGTGTGAGACATGGGAACTTCGGTAATAGCTACATATCCTACTGGGCTTACTGGGGCCAAG |
| | | | | GGACTCTGGTCACCGTCTCCTCAGGTGGTGGTGGTTCTGGCGGCGGCGGCTCCGGTGGTGGTGGT |
| | | | | TCTCAGACTGTTGTGACTCAGGAACCTTCACTCACCGTATCACCTGGTGGAACAGTCACACTCAC |
| | | | | TTGTGGCTCCTCGACTGGGGCTGTTACATCTGGCAACTACCCAAACTGGGTCCAACAAAAACCAG |
| | | | | GTCAGGCACCCCGTGGTCTAATAGGTGGGACTAAGTTCCTCGCCCCCGGTACTCCTGCCAGATTC |
| | | | | TCAGGCTCCCTGCTTGGAGGCAAGGCTGCCCTCACCCTCTCAGGGGTACAGCCAGAGGATGAGGC |
| | | | | AGAATATTACTGTGTTCTATGGTACAGCAACCGCTGGGTGTTCGGTGGAGGAACCAAACTGACTG |
| | | | | TCCTA |
| 323. | MCSP-C8 | artificial | aa | QVQLVQSGAEVKRPGASMKVSCKASGYTFTNYYIHWVRQAPGQGLEWMGWINPNSGATNYAQKFQ |
| | HL x I2C HL | | | GRVTMTRDTSTSTVYMELSSLRSEDTAVYYCAKSWVSWFASWGQGTLVTVSSGGGGSGGGGSGGG |
| | | | | GSDIVMTQSPDSLAVSLGERATINCKSSQSVLNSKNNRNYLAWYQQKPGQPPKLLIYWASTRESG |
| | | | | VPDRFSGSGSGTDFTLTISGLQAEDVAVYYCQQHYSTPFTFGPGTKVDIKSGGGGSEVQLVESGG |
| | | | | GLVQPGGSLKLSCAASGFTFNKYAMNWVRQAPGKGLEWVARIRSKYNNYATYYADSVKDRFTISR |
| | | | | DDSKNTAYLQMNNLKTEDTAVYYCVRHGNFGNSYISYWAYWGQGTLVTVSSGGGGSGGGGSGGGG |
| | | | | SQTVVTQEPSLTVSPGGTVTLTCGSSTGAVTSGNYPNWVQQKPGQAPRGLIGGTKFLAPGTPARF |
| | | | | SGSLLGGKAALTLSGVQPEDEAEYYCVLWYSNRWVFGGGTKLTVL |
| 324. | MCSP-C8 | artificial | nt | CAGGTGCAGCTGGTCCAGTCTGGGGCTGAGGTGAAGAGGCCTGGGGCCTCAATGAAGGTCTCCTG |
| | HL x I2C HL | | | CAAGGCTTCTGGGTACACCTTCACCAACTACTATATACACTGGGTGCGACAGGCCCCTGGACAAG |
| | | | | GTCTTGAGTGGATGGGTTGGATCAACCCTAACAGTGGTGCCACAAACTATGCACAGAAGTTCCAG |
| | | | | GGCAGAGTCACCATGACCAGGGACACGTCCACGAGCACAGTCTACATGGAGCTGAGCAGCCTGAG |
| | | | | ATCTGAGGACACGGCCGTGTATTACTGTGCGAAATCCTGGGTCTCCTGGTTTGCTTCCTGGGGTC |
| | | | | AAGGAACCTTGGTCACCGTCTCCTCAGGTGGTGGTGGTTCTGGCGGCGGCGGCTCCGGTGGTGGT |
| | | | | GGTTCTGACATCGTGATGACCCAGTCTCCAGACTCCCTGGCTGTGTCTCTGGGCGAGAGGGCCAC |
| | | | | CATCAACTGCAAGTCCAGCCAGAGTGTTTTAAACAGCAAGAACAATAGGAACTACTTAGCTTGGT |
| | | | | ACCAGCAGAAACCAGGACAGCCTCCTAAGCTGCTCATTTACTGGGCATCTACCCGGGAATCCGGG |
| | | | | GTCCCTGACCGATTCAGTGGCAGCGGGTCTGGGACAGATTTCACTCTCACCATCAGTGGCCTGCA |
| | | | | GGCTGAAGATGTGGCAGTTTATTACTGTCAGCAACATTATAGTACTCCATTCACTTTTGGCCCTG |
| | | | | GGACCAAAGTGGATATCAAATCCGGAGGTGGTGGATCCGAGGTGCAGCTGGTCGAGTCTGGAGGA |
| | | | | GGATTGGTGCAGCCTGGAGGGTCATTGAAACTCTCATGTGCAGCCTCTGGATTCACCTTCAATAA |
| | | | | GTACGCCATGAACTGGGTCCGCCAGGCTCCAGGAAAGGGTTTGGAATGGGTTGCTCGCATAAGAA |
| | | | | GTAAATATAATAATTATGCAACATATTATGCCGATTCAGTGAAAGACAGGTTCACCATCTCCAGA |
| | | | | GATGATTCAAAAAACACTGCCTATCTACAAATGAACAACTTGAAAACTGAGGACACTGCCGTGTA |
| | | | | CTACTGTGTGAGACATGGGAACTTCGGTAATAGCTACATATCCTACTGGGCTTACTGGGGCCAAG |
| | | | | GGACTCTGGTCACCGTCTCCTCAGGTGGTGGTGGTTCTGGCGGCGGCGGCTCCGGTGGTGGTGGT |
| | | | | TCTCAGACTGTTGTGACTCAGGAACCTTCACTCACCGTATCACCTGGTGGAACAGTCACACTCAC |
| | | | | TTGTGGCTCCTCGACTGGGGCTGTTACATCTGGCAACTACCCAAACTGGGTCCAACAAAAACCAG |
| | | | | GTCAGGCACCCCGTGGTCTAATAGGTGGGACTAAGTTCCTCGCCCCCGGTACTCCTGCCAGATTC |
| | | | | TCAGGCTCCCTGCTTGGAGGCAAGGCTGCCCTCACCCTCTCAGGGGTACAGCCAGAGGATGAGGC |
| | | | | AGAATATTACTGTGTTCTATGGTACAGCAACCGCTGGGTGTTCGGTGGAGGAACCAAACTGACTG |
| | | | | TCCTA |
| 325. | MCSP-B8 | artificial | aa | QVQLVQSGAEVKRPGASMKVSCKASGYTFTNYYIHWVRQAPGQGLEWMGWINPNSGATNYAQKFQ |
| | HL x I2C HL | | | GRVTMTRDTSTSTVYMELSSLRSEDTAVYYCAKSWVSWFASWGQGTLVTVSSGGGGSGGGGSGGG |
| | | | | GSDIVMTQSPDSLTVSPGERATINCKSSQSVLNSKNNRNYLAWYQQKPGQPPKLLIYWASTRESG |
| | | | | VPDRFSGSGSGTDFTLTIDSLQPEDSATYYCQQHYSTPFTFGQGTRLEIKSGGGGSEVQLVESGG |
| | | | | GLVQPGGSLKLSCAASGFTFNKYAMNWVRQAPGKGLEWVARIRSKYNNYATYYADSVKDRFTISR |
| | | | | DDSKNTAYLQMNNLKTEDTAVYYCVRHGNFGNSYISYWAYWGQGTLVTVSSGGGGSGGGGSGGGG |
| | | | | SQTVVTQEPSLTVSPGGTVTLTCGSSTGAVTSGNYPNWVQQKPGQAPRGLIGGTKFLAPGTPARF |
| | | | | SGSLLGGKAALTLSGVQPEDEAEYYCVLWYSNRWVFGGGTKLTVL |
| 326. | MCSP-B8 | artificial | nt | CAGGTGCAGCTGGTCCAGTCTGGGGCTGAGGTGAAGAGGCCTGGGGCCTCAATGAAGGTCTCCTG |
| | HL x I2C HL | | | CAAGGCTTCTGGGTACACCTTCACCAACTACTATATACACTGGGTGCGACAGGCCCCTGGACAAG |
| | | | | GTCTTGAGTGGATGGGTTGGATCAACCCTAACAGTGGTGCCACAAACTATGCACAGAAGTTCCAG |
| | | | | GGCAGAGTCACCATGACCAGGGACACGTCCACGAGCACAGTCTACATGGAGCTGAGCAGCCTGAG |
| | | | | ATCTGAGGACACGGCCGTGTATTACTGTGCGAAATCCTGGGTCTCCTGGTTTGCTTCCTGGGGTC |
| | | | | AAGGAACCTTGGTCACCGTCTCCTCAGGTGGTGGTGGTTCTGGCGGCGGCGGCTCCGGTGGTGGT |
| | | | | GGTTCTGACATCGTGATGACCCAGTCTCCAGACTCCCTGACTGTGTCTCCGGGCGAGAGGGCCAC |
| | | | | CATCAACTGCAAGTCCAGCCAGAGTGTTTTAAACAGCAAGAACAATAGGAACTACTTAGCTTGGT |
| | | | | ACCAGCAGAAACCAGGACAGCCTCCTAAGCTGCTCATTTACTGGGCATCTACCCGGGAATCCGGG |
| | | | | GTCCCTGACCGATTCAGTGGCAGCGGGTCTGGGACAGATTTCACTCTCACCATCGATTCCCTGCA |
| | | | | GCCTGAAGATAGTGCAACTTATTACTGTCAGCAACATTATAGTACTCCATTCACTTTTGGCCAGG |
| | | | | GGACCAGACTGGAGATCAAATCCGGAGGTGGTGGATCCGAGGTGCAGCTGGTCGAGTCTGGAGGA |
| | | | | GGATTGGTGCAGCCTGGAGGGTCATTGAAACTCTCATGTGCAGCCTCTGGATTCACCTTCAATAA |
| | | | | GTACGCCATGAACTGGGTCCGCCAGGCTCCAGGAAAGGGTTTGGAATGGGTTGCTCGCATAAGAA |
| | | | | GTAAATATAATAATTATGCAACATATTATGCCGATTCAGTGAAAGACAGGTTCACCATCTCCAGA |
| | | | | GATGATTCAAAAAACACTGCCTATCTACAAATGAACAACTTGAAAACTGAGGACACTGCCGTGTA |
| | | | | CTACTGTGTGAGACATGGGAACTTCGGTAATAGCTACATATCCTACTGGGCTTACTGGGGCCAAG |
| | | | | GGACTCTGGTCACCGTCTCCTCAGGTGGTGGTGGTTCTGGCGGCGGCGGCTCCGGTGGTGGTGGT |
| | | | | TCTCAGACTGTTGTGACTCAGGAACCTTCACTCACCGTATCACCTGGTGGAACAGTCACACTCAC |
| | | | | TTGTGGCTCCTCGACTGGGGCTGTTACATCTGGCAACTACCCAAACTGGGTCCAACAAAAACCAG |
| | | | | GTCAGGCACCCCGTGGTCTAATAGGTGGGACTAAGTTCCTCGCCCCCGGTACTCCTGCCAGATTC |
| | | | | TCAGGCTCCCTGCTTGGAGGCAAGGCTGCCCTCACCCTCTCAGGGGTACAGCCAGAGGATGAGGC |
| | | | | AGAATATTACTGTGTTCTATGGTACAGCAACCGCTGGGTGTTCGGTGGAGGAACCAAACTGACTG |
| | | | | TCCTA |
| 327. | MCSP-B7 | artificial | aa | QVQLVQSGAEVKRPGASMKVSCKASGYTFTNYYIHWVRQAPGQGLEWMGWINPNSGATNYAQKFQ |
| | HL x I2C HL | | | GRVTMTRDTSTSTVYMELSSLRSEDTAVYYCAKSWVSWFASWGQGTLVTVSSGGGGSGGGGSGGG |
| | | | | GSDIVMTQSPDSLTVSLGERTTINCKSSQSVLNSKNNRNYLAWYQQKPGQPPKLLIYWASTRESG |
| | | | | VPDRFSGSGSGTDFTLTIDSLQPEDIATYYCQQHYSTPFTFGQGTRLEIKSGGGGSEVQLVESGG |
| | | | | GLVQPGGSLKLSCAASGFTFNKYAMNWVRQAPGKGLEWVARIRSKYNNYATYYADSVKDRFTISR |
| | | | | DDSKNTAYLQMNNLKTEDTAVYYCVRHGNFGNSYISYWAYWGQGTLVTVSSGGGGSGGGGSGGGG |
| | | | | SQTVVTQEPSLTVSPGGTVTLTCGSSTGAVTSGNYPNWVQQKPGQAPRGLIGGTKFLAPGTPARF |
| | | | | SGSLLGGKAALTLSGVQPEDEAEYYCVLWYSNRWVFGGGTKLTVL |
| 328. | MCSP-B7 | artificial | nt | CAGGTGCAGCTGGTCCAGTCTGGGGCTGAGGTGAAGAGGCCTGGGGCCTCAATGAAGGTCTCCTG |
| | HL x I2C HL | | | CAAGGCTTCTGGGTACACCTTCACCAACTACTATATACACTGGGTGCGACAGGCCCCTGGACAAG |
| | | | | GTCTTGAGTGGATGGGTTGGATCAACCCTAACAGTGGTGCCACAAACTATGCACAGAAGTTCCAG |
| | | | | GGCAGAGTCACCATGACCAGGGACACGTCCACGAGCACAGTCTACATGGAGCTGAGCAGCCTGAG |
| | | | | ATCTGAGGACACGGCCGTGTATTACTGTGCGAAATCCTGGGTCTCCTGGTTTGCTTCCTGGGGTC |
| | | | | AAGGAACCTTGGTCACCGTCTCCTCAGGTGGTGGTGGTTCTGGCGGCGGCGGCTCCGGTGGTGGT |
| | | | | GGTTCTGACATCGTGATGACCCAGTCTCCAGACTCCCTGACTGTGTCTCTGGGCGAGAGGACCAC |
| | | | | CATCAACTGCAAGTCCAGCCAGAGTGTTTTAAACAGCAAGAACAATAGGAACTACTTAGCTTGGT |
| | | | | ACCAGCAGAAACCAGGACAGCCTCCTAAGCTGCTCATTTACTGGGCATCTACCCGGGAATCCGGG |
| | | | | GTCCCTGACCGATTCAGTGGCAGCGGGTCTGGGACAGATTTCACTCTCACCATCGATTCCCTGCA |
| | | | | GCCTGAAGATATTGCAACTTATTACTGTCAGCAACATTATAGTACTCCATTCACTTTTGGCCAGG |
| | | | | GGACCAGACTGGAGATCAAATCCGGAGGTGGTGGATCCGAGGTGCAGCTGGTCGAGTCTGGAGGA |
| | | | | GGATTGGTGCAGCCTGGAGGGTCATTGAAACTCTCATGTGCAGCCTCTGGATTCACCTTCAATAA |
| | | | | GTACGCCATGAACTGGGTCCGCCAGGCTCCAGGAAAGGGTTTGGAATGGGTTGCTCGCATAAGAA |
| | | | | GTAAATATAATAATTATGCAACATATTATGCCGATTCAGTGAAAGACAGGTTCACCATCTCCAGA |
| | | | | GATGATTCAAAAAACACTGCCTATCTACAAATGAACAACTTGAAAACTGAGGACACTGCCGTGTA |
| | | | | CTACTGTGTGAGACATGGGAACTTCGGTAATAGCTACATATCCTACTGGGCTTACTGGGGCCAAG |
| | | | | GGACTCTGGTCACCGTCTCCTCAGGTGGTGGTGGTTCTGGCGGCGGCGGCTCCGGTGGTGGTGGT |
| | | | | TCTCAGACTGTTGTGACTCAGGAACCTTCACTCACCGTATCACCTGGTGGAACAGTCACACTCAC |
| | | | | TTGTGGCTCCTCGACTGGGGCTGTTACATCTGGCAACTACCCAAACTGGGTCCAACAAAAACCAG |
| | | | | GTCAGGCACCCCGTGGTCTAATAGGTGGGACTAAGTTCCTCGCCCCCGGTACTCCTGCCAGATTC |
| | | | | TCAGGCTCCCTGCTTGGAGGCAAGGCTGCCCTCACCCTCTCAGGGGTACAGCCAGAGGATGAGGC |
| | | | | AGAATATTACTGTGTTCTATGGTACAGCAACCGCTGGGTGTTCGGTGGAGGAACCAAACTGACTG |
| | | | | TCCTA |
| 329. | MCSP-G8 | artificial | aa | QVQLVQSGAEVKRPGASMKVSCKASGYTFTNYYIHWVRQAPGQGLEWMGWINPNSGATNYAQKFQ |
| | HL x I2C HL | | | GRVTMTRDTSTSTVYMELSSLRSEDTAVYYCAKSWVSWFASWGQGTLVTVSSGGGGSGGGGSGGG |
| | | | | GSDIVMTQSPDSLTVSLGERATINCKSSQSVLNSKNNRNYLAWYQQKPGQPPKLLIYWASTRESG |
| | | | | VPDRFSGSGSGTDFTLTIDSLQPEDSATYYCQQHYSTPFTFGQGTRLEIKSGGGGSEVQLVESGG |
| | | | | GLVQPGGSLKLSCAASGFTFNKYAMNWVRQAPGKGLEWVARIRSKYNNYATYYADSVKDRFTISR |
| | | | | DDSKNTAYLQMNNLKTEDTAVYYCVRHGNFGNSYISYWAYWGQGTLVTVSSGGGGSGGGGSGGGG |
| | | | | SQTVVTQEPSLTVSPGGTVTLTCGSSTGAVTSGNYPNWVQQKPGQAPRGLIGGTKFLAPGTPARF |
| | | | | SGSLLGGKAALTLSGVQPEDEAEYYCVLWYSNRWVFGGGTKLTVL |
| 330. | MCSP-G8 | artificial | nt | CAGGTGCAGCTGGTCCAGTCTGGGGCTGAGGTGAAGAGGCCTGGGGCCTCAATGAAGGTCTCCTG |
| | HL x I2C HL | | | CAAGGCTTCTGGGTACACCTTCACCAACTACTATATACACTGGGTGCGACAGGCCCCTGGACAAG |
| | | | | GTCTTGAGTGGATGGGTTGGATCAACCCTAACAGTGGTGCCACAAACTATGCACAGAAGTTCCAG |
| | | | | GGCAGAGTCACCATGACCAGGGACACGTCCACGAGCACAGTCTACATGGAGCTGAGCAGCCTGAG |
| | | | | ATCTGAGGACACGGCCGTGTATTACTGTGCGAAATCCTGGGTCTCCTGGTTTGCTTCCTGGGGTC |
| | | | | AAGGAACCTTGGTCACCGTCTCCTCAGGTGGTGGTGGTTCTGGCGGCGGCGGCTCCGGTGGTGGT |
| | | | | GGTTCTGACATCGTGATGACCCAGTCTCCAGACTCCCTGACTGTGTCTCTGGGCGAGAGGGCCAC |
| | | | | CATCAACTGCAAGTCCAGCCAGAGTGTTTTAAACAGCAAGAACAATAGGAACTACTTAGCTTGGT |
| | | | | ACCAGCAGAAACCAGGACAGCCTCCTAAGCTGCTCATTTACTGGGCATCTACCCGGGAATCCGGG |
| | | | | GTCCCTGACCGATTCAGTGGCAGCGGGTCTGGGACAGATTTCACTCTCACCATCGATTCCCTGCA |
| | | | | GCCTGAAGATAGTGCAACTTATTACTGTCAGCAACATTATAGTACTCCATTCACTTTTGGCCAGG |
| | | | | GGACCAGACTGGAGATCAAATCCGGAGGTGGTGGATCCGAGGTGCAGCTGGTCGAGTCTGGAGGA |
| | | | | GGATTGGTGCAGCCTGGAGGGTCATTGAAACTCTCATGTGCAGCCTCTGGATTCACCTTCAATAA |
| | | | | GTACGCCATGAACTGGGTCCGCCAGGCTCCAGGAAAGGGTTTGGAATGGGTTGCTCGCATAAGAA |
| | | | | GTAAATATAATAATTATGCAACATATTATGCCGATTCAGTGAAAGACAGGTTCACCATCTCCAGA |
| | | | | GATGATTCAAAAAACACTGCCTATCTACAAATGAACAACTTGAAAACTGAGGACACTGCCGTGTA |
| | | | | CTACTGTGTGAGACATGGGAACTTCGGTAATAGCTACATATCCTACTGGGCTTACTGGGGCCAAG |
| | | | | GGACTCTGGTCACCGTCTCCTCAGGTGGTGGTGGTTCTGGCGGCGGCGGCTCCGGTGGTGGTGGT |
| | | | | TCTCAGACTGTTGTGACTCAGGAACCTTCACTCACCGTATCACCTGGTGGAACAGTCACACTCAC |
| | | | | TTGTGGCTCCTCGACTGGGGCTGTTACATCTGGCAACTACCCAAACTGGGTCCAACAAAAACCAG |
| | | | | GTCAGGCACCCCGTGGTCTAATAGGTGGGACTAAGTTCCTCGCCCCCGGTACTCCTGCCAGATTC |
| | | | | TCAGGCTCCCTGCTTGGAGGCAAGGCTGCCCTCACCCTCTCAGGGGTACAGCCAGAGGATGAGGC |
| | | | | AGAATATTACTGTGTTCTATGGTACAGCAACCGCTGGGTGTTCGGTGGAGGAACCAAACTGACTG |
| | | | | TCCTA |
| 331. | MCSP-D5 | artificial | aa | QVQLVQSGAEVKRPGASMKVSCKASGYTFTNYYIHWVRQAPGQGLEWMGWINPNSGATNYAQKFQ |
| | HL x I2C HL | | | GRVTMTRDTSTSTVYMELSSLRSEDTAVYYCAKSWVSWFASWGQGTLVTVSSGGGGSGGGGSGGG |
| | | | | GSDIVMTQSPDSLAVSLGERATINCKSSQSVLNSKNNRNYLAWYQQKPGQPPKLLIYWASTRESG |
| | | | | VPDRFSGSGSGTDFTLTIDSLQAEDSATYYCQQHYSTPFTFGQGTRLEIKSGGGGSEVQLVESGG |
| | | | | GLVQPGGSLKLSCAASGFTFNKYAMNWVRQAPGKGLEWVARIRSKYNNYATYYADSVKDRFTISR |
| | | | | DDSKNTAYLQMNNLKTEDTAVYYCVRHGNFGNSYISYWAYWGQGTLVTVSSGGGGSGGGGSGGGG |
| | | | | SQTVVTQEPSLTVSPGGTVTLTCGSSTGAVTSGNYPNWVQQKPGQAPRGLIGGTKFLAPGTPARF |
| | | | | SGSLLGGKAALTLSGVQPEDEAEYYCVLWYSNRWVFGGGTKLTVL |
| 332. | MCSP-D5 | artificial | nt | CAGGTGCAGCTGGTCCAGTCTGGGGCTGAGGTGAAGAGGCCTGGGGCCTCAATGAAGGTCTCCTG |
| | HL x I2C HL | | | CAAGGCTTCTGGGTACACCTTCACCAACTACTATATACACTGGGTGCGACAGGCCCCTGGACAAG |
| | | | | GTCTTGAGTGGATGGGTTGGATCAACCCTAACAGTGGTGCCACAAACTATGCACAGAAGTTCCAG |
| | | | | GGCAGAGTCACCATGACCAGGGACACGTCCACGAGCACAGTCTACATGGAGCTGAGCAGCCTGAG |
| | | | | ATCTGAGGACACGGCCGTGTATTACTGTGCGAAATCCTGGGTCTCCTGGTTTGCTTCCTGGGGTC |
| | | | | AAGGAACCTTGGTCACCGTCTCCTCAGGTGGTGGTGGTTCTGGCGGCGGCGGCTCCGGTGGTGGT |
| | | | | GGTTCTGACATCGTGATGACCCAGTCTCCAGACTCCCTGGCTGTGTCTCTGGGCGAGAGGGCCAC |
| | | | | CATCAACTGCAAGTCCAGCCAGAGTGTTTTAAACAGCAAGAACAATAGGAACTACTTAGCTTGGT |
| | | | | ACCAGCAGAAACCAGGACAGCCTCCTAAGCTGCTCATTTACTGGGCATCTACCCGGGAATCCGGG |
| | | | | GTCCCTGACCGATTCAGTGGCAGCGGGTCTGGGACAGATTTCACTCTCACCATCGATTCCCTGCA |
| | | | | GGCTGAAGATAGTGCAACTTATTACTGTCAGCAACATTATAGTACTCCATTCACTTTTGGCCAGG |
| | | | | GGACCAGACTGGAGATCAAATCCGGAGGTGGTGGATCCGAGGTGCAGCTGGTCGAGTCTGGAGGA |
| | | | | GGATTGGTGCAGCCTGGAGGGTCATTGAAACTCTCATGTGCAGCCTCTGGATTCACCTTCAATAA |
| | | | | GTACGCCATGAACTGGGTCCGCCAGGCTCCAGGAAAGGGTTTGGAATGGGTTGCTCGCATAAGAA |
| | | | | GTAAATATAATAATTATGCAACATATTATGCCGATTCAGTGAAAGACAGGTTCACCATCTCCAGA |
| | | | | GATGATTCAAAAAACACTGCCTATCTACAAATGAACAACTTGAAAACTGAGGACACTGCCGTGTA |
| | | | | CTACTGTGTGAGACATGGGAACTTCGGTAATAGCTACATATCCTACTGGGCTTACTGGGGCCAAG |
| | | | | GGACTCTGGTCACCGTCTCCTCAGGTGGTGGTGGTTCTGGCGGCGGCGGCTCCGGTGGTGGTGGT |
| | | | | TCTCAGACTGTTGTGACTCAGGAACCTTCACTCACCGTATCACCTGGTGGAACAGTCACACTCAC |
| | | | | TTGTGGCTCCTCGACTGGGGCTGTTACATCTGGCAACTACCCAAACTGGGTCCAACAAAAACCAG |
| | | | | GTCAGGCACCCCGTGGTCTAATAGGTGGGACTAAGTTCCTCGCCCCCGGTACTCCTGCCAGATTC |
| | | | | TCAGGCTCCCTGCTTGGAGGCAAGGCTGCCCTCACCCTCTCAGGGGTACAGCCAGAGGATGAGGC |
| | | | | AGAATATTACTGTGTTCTATGGTACAGCAACCGCTGGGTGTTCGGTGGAGGAACCAAACTGACTG |
| | | | | TCCTA |
| 333. | MCSP-F7 | artificial | aa | QVQLVQSGAEVKRPGASMKVSCKASGYTFTNYYIHWVRQAPGQGLEWMGWINPNSGATNYAQKFQ |
| | HL x I2C HL | | | GRVTMTRDTSTSTVYMELSSLRSEDTAVYYCAKSWVSWFASWGQGTLVTVSSGGGGSGGGGSGGG |
| | | | | GSDIVMTQSPDSLAVSLGERATINCKSSQSVLNSKNNRNYLAWYQQKPGQPPKLLIYWASTRESG |
| | | | | VPDRFSGSGSGTDFTLTIDVLQPEDIATYYCQQHYSTPFTFGQGTRLEIKSGGGGSEVQLVESGG |
| | | | | GLVQPGGSLKLSCAASGFTFNKYAMNWVRQAPGKGLEWVARIRSKYNNYATYYADSVKDRFTISR |
| | | | | DDSKNTAYLQMNNLKTEDTAVYYCVRHGNFGNSYISYWAYWGQGTLVTVSSGGGGSGGGGSGGGG |
| | | | | SQTVVTQEPSLTVSPGGTVTLTCGSSTGAVTSGNYPNWVQQKPGQAPRGLIGGTKFLAPGTPARF |
| | | | | SGSLLGGKAALTLSGVQPEDEAEYYCVLWYSNRWVFGGGTKLTVL |
| 334. | MCSP-F7 | artificial | nt | CAGGTGCAGCTGGTCCAGTCTGGGGCTGAGGTGAAGAGGCCTGGGGCCTCAATGAAGGTCTCCTG |
| | HL x I2C HL | | | CAAGGCTTCTGGGTACACCTTCACCAACTACTATATACACTGGGTGCGACAGGCCCCTGGACAAG |
| | | | | GTCTTGAGTGGATGGGTTGGATCAACCCTAACAGTGGTGCCACAAACTATGCACAGAAGTTCCAG |
| | | | | GGCAGAGTCACCATGACCAGGGACACGTCCACGAGCACAGTCTACATGGAGCTGAGCAGCCTGAG |
| | | | | ATCTGAGGACACGGCCGTGTATTACTGTGCGAAATCCTGGGTCTCCTGGTTTGCTTCCTGGGGTC |
| | | | | AAGGAACCTTGGTCACCGTCTCCTCAGGTGGTGGTGGTTCTGGCGGCGGCGGCTCCGGTGGTGGT |
| | | | | GGTTCTGACATCGTGATGACCCAGTCTCCAGACTCCCTGGCTGTGTCTCTGGGCGAGAGGGCCAC |
| | | | | CATCAACTGCAAGTCCAGCCAGAGTGTTTTAAACAGCAAGAACAATAGGAACTACTTAGCTTGGT |
| | | | | ACCAGCAGAAACCAGGACAGCCTCCTAAGCTGCTCATTTACTGGGCATCTACCCGGGAATCCGGG |
| | | | | GTCCCTGACCGATTCAGTGGCAGCGGGTCTGGGACAGATTTCACTCTCACCATCGATGTCCTGCA |
| | | | | GCCTGAAGATATTGCAACTTATTACTGTCAGCAACATTATAGTACTCCATTCACTTTTGGCCAGG |
| | | | | GGACCAGACTGGAGATCAAATCCGGAGGTGGTGGATCCGAGGTGCAGCTGGTCGAGTCTGGAGGA |
| | | | | GGATTGGTGCAGCCTGGAGGGTCATTGAAACTCTCATGTGCAGCCTCTGGATTCACCTTCAATAA |
| | | | | GTACGCCATGAACTGGGTCCGCCAGGCTCCAGGAAAGGGTTTGGAATGGGTTGCTCGCATAAGAA |
| | | | | GTAAATATAATAATTATGCAACATATTATGCCGATTCAGTGAAAGACAGGTTCACCATCTCCAGA |
| | | | | GATGATTCAAAAAACACTGCCTATCTACAAATGAACAACTTGAAAACTGAGGACACTGCCGTGTA |
| | | | | CTACTGTGTGAGACATGGGAACTTCGGTAATAGCTACATATCCTACTGGGCTTACTGGGGCCAAG |
| | | | | GGACTCTGGTCACCGTCTCCTCAGGTGGTGGTGGTTCTGGCGGCGGCGGCTCCGGTGGTGGTGGT |
| | | | | TCTCAGACTGTTGTGACTCAGGAACCTTCACTCACCGTATCACCTGGTGGAACAGTCACACTCAC |
| | | | | TTGTGGCTCCTCGACTGGGGCTGTTACATCTGGCAACTACCCAAACTGGGTCCAACAAAAACCAG |
| | | | | GTCAGGCACCCCGTGGTCTAATAGGTGGGACTAAGTTCCTCGCCCCCGGTACTCCTGCCAGATTC |
| | | | | TCAGGCTCCCTGCTTGGAGGCAAGGCTGCCCTCACCCTCTCAGGGGTACAGCCAGAGGATGAGGC |
| | | | | AGAATATTACTGTGTTCTATGGTACAGCAACCGCTGGGTGTTCGGTGGAGGAACCAAACTGACTG |
| | | | | TCCTA |
| 335. | MCSP-G5 | artificial | aa | QVQLVQSGAEVKRPGASMKVSCKASGYTFTNYYIHWVRQAPGQGLEWMGWINPNSGATNYAQKFQ |
| | HL x I2C HL | | | GRVTMTRDTSTSTVYMELSSLRSEDTAVYYCAKSWVSWFASWGQGTLVTVSSGGGGSGGGGSGGG |
| | | | | GSDIVMTQSPDSLAVSLGDRATINCKSSQSVLNSKNNRNYLAWYQQKPGQPPKLLIYWASTRESG |
| | | | | VPDRFSGSGSGTDFTLTIDSLQPEDSATYYCQQHYSTPFTFGQGTRLEIKSGGGGSEVQLVESGG |
| | | | | GLVQPGGSLKLSCAASGFTFNKYAMNWVRQAPGKGLEWVARIRSKYNNYATYYADSVKDRFTISR |
| | | | | DDSKNTAYLQMNNLKTEDTAVYYCVRHGNFGNSYISYWAYWGQGTLVTVSSGGGGSGGGGSGGGG |
| | | | | SQTVVTQEPSLTVSPGGTVTLTCGSSTGAVTSGNYPNWVQQKPGQAPRGLIGGTKFLAPGTPARF |
| | | | | SGSLLGGKAALTLSGVQPEDEAEYYCVLWYSNRWVFGGGTKLTVL |
| 336. | MCSP-G5 | artificial | nt | CAGGTGCAGCTGGTCCAGTCTGGGGCTGAGGTGAAGAGGCCTGGGGCCTCAATGAAGGTCTCCTG |
| | HL x I2C HL | | | CAAGGCTTCTGGGTACACCTTCACCAACTACTATATACACTGGGTGCGACAGGCCCCTGGACAAG |
| | | | | GTCTTGAGTGGATGGGTTGGATCAACCCTAACAGTGGTGCCACAAACTATGCACAGAAGTTCCAG |
| | | | | GGCAGAGTCACCATGACCAGGGACACGTCCACGAGCACAGTCTACATGGAGCTGAGCAGCCTGAG |
| | | | | ATCTGAGGACACGGCCGTGTATTACTGTGCGAAATCCTGGGTCTCCTGGTTTGCTTCCTGGGGTC |
| | | | | AAGGAACCTTGGTCACCGTCTCCTCAGGTGGTGGTGGTTCTGGCGGCGGCGGCTCCGGTGGTGGT |
| | | | | GGTTCTGACATCGTGATGACCCAGTCTCCAGACTCCCTGGCTGTGTCTCTGGGCGACAGGGCCAC |
| | | | | CATCAACTGCAAGTCCAGCCAGAGTGTTTTAAACAGCAAGAACAATAGGAACTACTTAGCTTGGT |
| | | | | ACCAGCAGAAACCAGGACAGCCTCCTAAGCTGCTCATTTACTGGGCATCTACCCGGGAATCCGGG |
| | | | | GTCCCTGACCGATTCAGTGGCAGCGGGTCTGGGACAGATTTCACTCTCACCATCGATTCCCTGCA |
| | | | | GCCTGAGGATAGTGCAACTTATTACTGTCAGCAACATTATAGTACTCCATTCACTTTTGGCCAGG |
| | | | | GGACCAGACTGGAGATCAAATCCGGAGGTGGTGGATCCGAGGTGCAGCTGGTCGAGTCTGGAGGA |
| | | | | GGATTGGTGCAGCCTGGAGGGTCATTGAAACTCTCATGTGCAGCCTCTGGATTCACCTTCAATAA |
| | | | | GTACGCCATGAACTGGGTCCGCCAGGCTCCAGGAAAGGGTTTGGAATGGGTTGCTCGCATAAGAA |
| | | | | GTAAATATAATAATTATGCAACATATTATGCCGATTCAGTGAAAGACAGGTTCACCATCTCCAGA |
| | | | | GATGATTCAAAAAACACTGCCTATCTACAAATGAACAACTTGAAAACTGAGGACACTGCCGTGTA |
| | | | | CTACTGTGTGAGACATGGGAACTTCGGTAATAGCTACATATCCTACTGGGCTTACTGGGGCCAAG |
| | | | | GGACTCTGGTCACCGTCTCCTCAGGTGGTGGTGGTTCTGGCGGCGGCGGCTCCGGTGGTGGTGGT |
| | | | | TCTCAGACTGTTGTGACTCAGGAACCTTCACTCACCGTATCACCTGGTGGAACAGTCACACTCAC |
| | | | | TTGTGGCTCCTCGACTGGGGCTGTTACATCTGGCAACTACCCAAACTGGGTCCAACAAAAACCAG |
| | | | | GTCAGGCACCCCGTGGTCTAATAGGTGGGACTAAGTTCCTCGCCCCCGGTACTCCTGCCAGATTC |
| | | | | TCAGGCTCCCTGCTTGGAGGCAAGGCTGCCCTCACCCTCTCAGGGGTACAGCCAGAGGATGAGGC |
| | | | | AGAATATTACTGTGTTCTATGGTACAGCAACCGCTGGGTGTTCGGTGGAGGAACCAAACTGACTG |
| | | | | TCCTA |
| 337. | MCSP-F8 | artificial | aa | QVQLVQSGAEVKRPGASMKVSCKASGYTFTNYYIHWVRQAPGQGLEWMGWINPNSGATNYAQKFQ |
| | HL x I2C HL | | | GRVTMTRDTSTSTVYMELSSLRSEDTAVYYCAKSWVSWFASWGQGTLVTVSSGGGGSGGGGSGGG |
| | | | | GSDIVMTQSPDSLTVSLGERATINCKSSQSVLNSKNNRNYLAWYQQKPGQPPKLLIYWASTRESG |
| | | | | VPDRFSGSGSGTDFTLTIDSLQAEDSAIYYCQQHYSTPFTFGQGTRLEIKSGGGGSEVQLVESGG |
| | | | | GLVQPGGSLKLSCAASGFTFNKYAMNWVRQAPGKGLEWVARIRSKYNNYATYYADSVKDRFTISR |
| | | | | DDSKNTAYLQMNNLKTEDTAVYYCVRHGNFGNSYISYWAYWGQGTLVTVSSGGGGSGGGGSGGGG |
| | | | | SQTVVTQEPSLTVSPGGTVTLTCGSSTGAVTSGNYPNWVQQKPGQAPRGLIGGTKFLAPGTPARF |
| | | | | SGSLLGGKAALTLSGVQPEDEAEYYCVLWYSNRWVFGGGTKLTVL |
| 338. | MCSP-F8 | artificial | nt | CAGGTGCAGCTGGTCCAGTCTGGGGCTGAGGTGAAGAGGCCTGGGGCCTCAATGAAGGTCTCCTG |
| | HL x I2C HL | | | CAAGGCTTCTGGGTACACCTTCACCAACTACTATATACACTGGGTGCGACAGGCCCCTGGACAAG |
| | | | | GTCTTGAGTGGATGGGTTGGATCAACCCTAACAGTGGTGCCACAAACTATGCACAGAAGTTCCAG |
| | | | | GGCAGAGTCACCATGACCAGGGACACGTCCACGAGCACAGTCTACATGGAGCTGAGCAGCCTGAG |
| | | | | ATCTGAGGACACGGCCGTGTATTACTGTGCGAAATCCTGGGTCTCCTGGTTTGCTTCCTGGGGTC |
| | | | | AAGGAACCTTGGTCACCGTCTCCTCAGGTGGTGGTGGTTCTGGCGGCGGCGGCTCCGGTGGTGGT |
| | | | | GGTTCTGACATCGTGATGACCCAGTCTCCAGACTCCCTGACTGTGTCTCTGGGCGAGAGGGCCAC |
| | | | | CATCAACTGCAAGTCCAGCCAGAGTGTTTTAAACAGCAAGAACAATAGGAACTACTTAGCTTGGT |
| | | | | ACCAGCAGAAACCAGGACAGCCTCCTAAGCTGCTCATTTACTGGGCATCTACCCGGGAATCCGGG |
| | | | | GTCCCTGACCGATTCAGTGGCAGCGGGTCTGGGACAGATTTCACTCTCACCATCGATTCCCTGCA |
| | | | | GGCTGAAGATAGTGCAATTTATTACTGTCAGCAACATTATAGTACTCCATTCACTTTTGGCCAGG |
| | | | | GGACCAGACTGGAGATCAAATCCGGAGGTGGTGGATCCGAGGTGCAGCTGGTCGAGTCTGGAGGA |
| | | | | GGATTGGTGCAGCCTGGAGGGTCATTGAAACTCTCATGTGCAGCCTCTGGATTCACCTTCAATAA |
| | | | | GTACGCCATGAACTGGGTCCGCCAGGCTCCAGGAAAGGGTTTGGAATGGGTTGCTCGCATAAGAA |
| | | | | GTAAATATAATAATTATGCAACATATTATGCCGATTCAGTGAAAGACAGGTTCACCATCTCCAGA |
| | | | | GATGATTCAAAAAACACTGCCTATCTACAAATGAACAACTTGAAAACTGAGGACACTGCCGTGTA |
| | | | | CTACTGTGTGAGACATGGGAACTTCGGTAATAGCTACATATCCTACTGGGCTTACTGGGGCCAAG |
| | | | | GGACTCTGGTCACCGTCTCCTCAGGTGGTGGTGGTTCTGGCGGCGGCGGCTCCGGTGGTGGTGGT |
| | | | | TCTCAGACTGTTGTGACTCAGGAACCTTCACTCACCGTATCACCTGGTGGAACAGTCACACTCAC |
| | | | | TTGTGGCTCCTCGACTGGGGCTGTTACATCTGGCAACTACCCAAACTGGGTCCAACAAAAACCAG |
| | | | | GTCAGGCACCCCGTGGTCTAATAGGTGGGACTAAGTTCCTCGCCCCCGGTACTCCTGCCAGATTC |
| | | | | TCAGGCTCCCTGCTTGGAGGCAAGGCTGCCCTCACCCTCTCAGGGGTACAGCCAGAGGATGAGGC |
| | | | | AGAATATTACTGTGTTCTATGGTACAGCAACCGCTGGGTGTTCGGTGGAGGAACCAAACTGACTG |
| | | | | TCCTA |
| 339. | MCSP-G10 | artificial | aa | QVQLVQSGAEVKRPGASMKVSCKASGYTFTNYYIHWVRQAPGQGLEWMGWINPNSGATNYAQKFQ |
| | HL x I2C HL | | | GRVTMTRDTSTSTVYMELSSLRSEDTAVYYCAKSWVSWFASWGQGTLVTVSSGGGGSGGGGSGGG |
| | | | | GSDIVMTQSPDSLAVSLGERATINCKSSQSVLSSSNNKNYLNWYQQKPGQPPKLLIYWASTRESG |
| | | | | VPDRFSGSGSGTDFTLTISSLQAEDVAVYYCQQHFNTPFAFGQGTKLEIKSGGGGSEVQLVESGG |
| | | | | GLVQPGGSLKLSCAASGFTFNKYAMNWVRQAPGKGLEWVARIRSKYNNYATYYADSVKDRFTISR |
| | | | | DDSKNTAYLQMNNLKTEDTAVYYCVRHGNFGNSYISYWAYWGQGTLVTVSSGGGGSGGGGSGGGG |
| | | | | SQTVVTQEPSLTVSPGGTVTLTCGSSTGAVTSGNYPNWVQQKPGQAPRGLIGGTKFLAPGTPARF |
| | | | | SGSLLGGKAALTLSGVQPEDEAEYYCVLWYSNRWVFGGGTKLTVL |
| 340. | MCSP-G10 | artificial | nt | CAGGTGCAGCTGGTCCAGTCTGGGGCTGAGGTGAAGAGGCCTGGGGCCTCAATGAAGGTCTCCTG |
| | HL x I2C HL | | | CAAGGCTTCTGGGTACACCTTCACCAACTACTATATACACTGGGTGCGACAGGCCCCTGGACAAG |
| | | | | GTCTTGAGTGGATGGGTTGGATCAACCCTAACAGTGGTGCCACAAACTATGCACAGAAGTTCCAG |
| | | | | GGCAGAGTCACCATGACCAGGGACACGTCCACGAGCACAGTCTACATGGAGCTGAGCAGCCTGAG |
| | | | | ATCTGAGGACACGGCCGTGTATTACTGTGCGAAATCCTGGGTCTCCTGGTTTGCTTCCTGGGGTC |
| | | | | AAGGAACCTTGGTCACCGTCTCCTCAGGTGGTGGTGGTTCTGGCGGCGGCGGCTCCGGTGGTGGT |
| | | | | GGTTCTGACATCGTGATGACACAGTCTCCAGACTCCCTGGCTGTGTCTCTGGGCGAGAGGGCCAC |
| | | | | CATCAACTGCAAGTCCAGCCAGAGTGTCTTATCCAGCTCCAACAATAAGAACTACTTAAATTGGT |
| | | | | ACCAGCAGAAACCAGGACAGCCTCCTAAGTTGCTCATTTACTGGGCATCTACCCGGGAATCCGGG |
| | | | | GTCCCTGACCGATTCAGTGGCAGCGGGTCTGGGACAGATTTCACTCTCACCATCAGCAGCCTGCA |
| | | | | GGCTGAAGATGTGGCGGTTTATTACTGTCAACAACATTTTAATACTCCGTTCGCTTTTGGCCAGG |
| | | | | GGACCAAGCTGGAGATCAAATCCGGAGGTGGTGGATCCGAGGTGCAGCTGGTCGAGTCTGGAGGA |
| | | | | GGATTGGTGCAGCCTGGAGGGTCATTGAAACTCTCATGTGCAGCCTCTGGATTCACCTTCAATAA |
| | | | | GTACGCCATGAACTGGGTCCGCCAGGCTCCAGGAAAGGGTTTGGAATGGGTTGCTCGCATAAGAA |
| | | | | GTAAATATAATAATTATGCAACATATTATGCCGATTCAGTGAAAGACAGGTTCACCATCTCCAGA |
| | | | | GATGATTCAAAAAACACTGCCTATCTACAAATGAACAACTTGAAAACTGAGGACACTGCCGTGTA |
| | | | | CTACTGTGTGAGACATGGGAACTTCGGTAATAGCTACATATCCTACTGGGCTTACTGGGGCCAAG |
| | | | | GGACTCTGGTCACCGTCTCCTCAGGTGGTGGTGGTTCTGGCGGCGGCGGCTCCGGTGGTGGTGGT |
| | | | | TCTCAGACTGTTGTGACTCAGGAACCTTCACTCACCGTATCACCTGGTGGAACAGTCACACTCAC |
| | | | | TTGTGGCTCCTCGACTGGGGCTGTTACATCTGGCAACTACCCAAACTGGGTCCAACAAAAACCAG |
| | | | | GTCAGGCACCCCGTGGTCTAATAGGTGGGACTAAGTTCCTCGCCCCCGGTACTCCTGCCAGATTC |
| | | | | TCAGGCTCCCTGCTTGGAGGCAAGGCTGCCCTCACCCTCTCAGGGGTACAGCCAGAGGATGAGGC |
| | | | | AGAATATTACTGTGTTCTATGGTACAGCAACCGCTGGGTGTTCGGTGGAGGAACCAAACTGACTG |
| | | | | TCCTA |
| 341. | Human | human | aa | QDGNEEMG |
| | CD3ε 1-8 | | | |
| | (N-terminus) | | | |
| 342. | Saimiri | Saimiri | aa | QDGNEEIG |
| | sciureus | sciureus | | |
| | CD3ε 1-8 | | | |
| | (N-terminus) | | | |
| 343. | Thioate- | artificial | nt | TCCATGACGTTCCTGATGCT |
| | modified | | | |
| | CpG-Oligo- | | | |
| | nucleotide | | | |
| 344. | MVH1 | artificial | nt | (GC)AGGTGCAGCTCGAGGAGTCAGGACCT |
| 345. | MVH2 | artificial | nt | GAGGTCCAGCTCGAGCAGTCTGGACCT |
| 346. | MVH3 | artificial | nt | CAGGTCCAACTCGAGCAGCCTGGGGCT |
| 347. | MVH4 | artificial | nt | GAGGTTCAGCTCGAGCAGTCTGGGGCA |
| 348. | MVH5 | artificial | nt | GA(AG)GTGAAGCTCGAGGAGTCTGGAGGA |
| 349. | MVH6 | artificial | nt | GAGGTGAAGCTTCTCGAGTCTGGAGGT |
| 350. | MVH7 | artificial | nt | GAAGTGAAGCTCGAGGAGTCTGGGGGA |
| 351. | MVH8 | artificial | nt | GAGGTTCAGCTCGAGCAGTCTGGAGCT |
| 352. | MuVHBstEII | artificial | nt | TGAGGAGACGGTGACCGTGGTCCCTTGGCCCCAG |
| 353. | MUVK1 | artificial | nt | CCAGTTCCGAGCTCGTTGTGACTCAGGAATCT |
| 354. | MUVK2 | artificial | nt | CCAGTTCCGAGCTCGTGTTGACGCAGCCGCCC |
| 355. | MUVK3 | artificial | nt | CCAGTTCCGAGCTCGTGCTCACCCAGTCTCCA |
| 356. | MUVK4 | artificial | nt | CCAGTTCCGAGCTCCAGATGACCCAGTCTCCA |
| 357. | MUVK5 | artificial | nt | CCAGATGTGAGCTCGTGATGACCCAGACTCCA |
| 358. | MUVK6 | artificial | nt | CCAGATGTGAGCTCGTCATGACCCAGTCTCCA |
| 359. | MUVK7 | artificial | nt | CCAGTTCCGAGCTCGTGATGACACAGTCTCCA |
| 360. | MuVkHindIII/ | artificial | nt | TGGTGCACTAGTCGTACGTTTGATCTCAAGCTTGGTCCC |
| | BsiW1 | | | |
| 361. | forward | artificial | nt | GATCTGGTCTACACCATCGAGC |
| | primer | | | |
| 362. | reverse | artificial | nt | GGAGCTGCTGCTGGCTCAGTGAGG |
| | primer | | | |
| 363. | forward | artificial | nt | TTCCAGCTGAGCATGTCTGATGG |
| | primer | | | |
| 364. | reverse | artificial | nt | CGATCAGCATCTGGGCCCAGG |
| | primer | | | |
| 365. | forward | artificial | nt | GTGGAGCAGTTCACTCAGCAGGACC |
| | primer | | | |
| 366. | reverse | artificial | nt | GCCTTCACACCCAGTACTGGCC |
| | primer | | | |
| 367. | forward | artificial | nt | TCCCGTACGAGATCTGGATCCCAATTGGATGGCGGACTCGTGCTGTTCTCACACAGAGG |
| | primer | | | |
| 368. | reverse | artificial | nt | AGTGGGTCGACTCACACCCAGTACTGGCCATTCTTAAGGGCAGGG |
| | primer | | | |
| 369. | forward | artificial | nt | GAGGAATTCACCATGCCGCTGCTGCTACTGCTGCCCCTGCTGTGGGCAGGGGCCCTGGCTATGG |
| | primer | | | |
| 370. | reverse | artificial | nt | GATTTGTAACTGTATTTGGTACTTCC |
| | primer | | | |
| 371. | forward | artificial | nt | ATTCCGCCTCCTTGGGGATCC |
| | primer | | | |
| 372. | reverse | artificial | nt | GCATAGGAGACATTGAGCTGGATGG |
| | primer | | | |
| 373. | forward | artificial | nt | GCACCAACCTGACCTGTCAGG |
| | primer | | | |
| 374. | reverse | artificial | nt | AGTGGGTCGACTCACTGGGTCCTGACCTCTGAGTATTCG |
| | primer | | | |
| 375. | forward | artificial | nt | CACTGTGGCCCAGGTTCGAGG |
| | primer | | | |
| 376. | reverse | artificial | nt | GACATACCACACAAATTCAATACGG |
| | primer | | | |
| 377. | forward | artificial | nt | GCTCTGCTCGCGCCGAGATGTGG |
| | primer | | | |
| 378. | reverse | artificial | nt | ACGCTGGACACCACCTCCAGG |
| | primer | | | |
| 379. | forward | artificial | nt | GGTTCTACTGAGTGGGCAGAGG |
| | primer | | | |
| 380. | reverse | artificial | nt | ACTTGTTGTGGCTGCTTGGAGC |
| | primer | | | |
| 381. | forward | artificial | nt | GGGTGAAGTCCTATCCAGATGG |
| | primer | | | |
| 382. | reverse | artificial | nt | GTGCTCTGCCTGAAGCAATTCC |
| | primer | | | |
| 383. | forward | artificial | nt | CTCGGCTTCCTCTTCGGGTGG |
| | primer | | | |
| 384. | reverse | artificial | nt | GCATATTCATTTGCTGGGTAACCTGG |
| | primer | | | |
| 385. | macaque PSMA | artificial | nt | ATGTGGAATCTCCTGCACGAAACCGACTCGGCTGTGGCCACCGCGCGCCGCCCGCGCTGGCTGTG |
| | (Cynomolgus) | | | CGCTGGGGCACTGGTGCTGGCGGGTGGCTTCTTTCTCCTCGGCTTCCTCTTCGGATGGTTTATAA |
| | | | | AATCCTCCAGTGAAGCTACTAACATTACTCCAAAGCATAATATGAAAGCATTTTTGGATGAACTG |
| | | | | AAAGCTGAGAACATCAAGAAGTTCTTACATAATTTTACACAGATACCACATTTAGCAGGAACAGA |
| | | | | ACAAAACTTTCAACTTGCAAAGCAAATTCAATCCCAGTGGAAAGAATTTGGCCTGGATTCTGTTG |
| | | | | AGCTAACTCATTATGATGTCCTGTTGTCCTACCCAAATAAGACTCATCCCAACTACATCTCAATA |
| | | | | ATTAATGAAGATGGAAATGAGATTTTCAACACATCATTATTTGAACCACCTCCTGCAGGATATGA |
| | | | | AAATGTTTCGGATATTGTACCACCTTTCAGTGCTTTCTCTCCTCAAGGAATGCCAGAGGGCGATC |
| | | | | TAGTGTATGTTAACTATGCACGAACTGAAGACTTCTTTAAATTGGAACGGGACATGAAAATCAAT |
| | | | | TGCTCTGGGAAAATTGTAATTGCCAGATATGGGAAAGTTTTCAGAGGAAATAAGGTTAAAAATGC |
| | | | | CCAGCTGGCAGGGGCCACAGGAGTCATTCTCTACTCAGACCCTGCTGACTACTTTGCTCCTGGGG |
| | | | | TAAAGTCTTATCCAGATGGTTGGAATCTTCCTGGAGGTGGTGTCCAGCGTGGAAATATCCTAAAT |
| | | | | CTGAATGGTGCAGGAGACCCTCTCACACCAGGTTACCCAGCAAATGAATATGCTTATAGGCGTGG |
| | | | | AATGGCAGAGGCTGTTGGTCTTCCAAGTATTCCCGTTCATCCAATTGGGTACTATGATGCACAGA |
| | | | | AGCTCCTAGAAAAAATGGGTGGCTCAGCATCACCAGATAGCAGCTGGAGAGGAAGTCTCAAAGTG |
| | | | | CCCTACAATGTTGGACCTGGCTTTACTGGAAACTTTTCTACACAAAAAGTCAAGATGCACATCCA |
| | | | | CTCTACCAGTGAAGTGACAAGAATTTACAATGTGATAGGTACTCTCAGAGGAGCAGTGGAACCAG |
| | | | | ACAGATACGTCATTCTGGGAGGTCACCGGGACTCATGGGTGTTTGGTGGTATTGACCCTCAGAGT |
| | | | | GGAGCAGCTGTTGTTCATGAAATTGTGAGGAGCTTTGGAACGCTGAAAAAGGAAGGGTGGAGACC |
| | | | | TAGAAGAACAATTTTGTTTGCAAGCTGGGATGCAGAAGAATTTGGTCTTCTTGGTTCTACTGAAT |
| | | | | GGGCAGAGGAGAATTCAAGACTCCTTCAAGAGCGTGGCGTGGCTTATATTAATGCTGATTCGTCT |
| | | | | ATAGAGGGAAACTACACTCTGAGAGTTGATTGTACACCACTGATGTACAGCTTGGTATACAACCT |
| | | | | AACAAAAGAGCTGGAAAGCCCTGATGAAGGCTTTGAAGGCAAATCTCTTTATGAAAGTTGGACTA |
| | | | | AAAAAAGTCCTTCCCCCGAGTTCAGTGGCATGCCCAGGATAAGCAAATTGGGATCTGGAAATGAT |
| | | | | TTTGAGGTGTTCTTCCAACGACTTGGAATTGCCTCAGGCAGAGCACGGTATACTAAAAATTGGGA |
| | | | | AACAAACAAATTCAGCAGCTATCCACTGTATCACAGTGTCTATGAGACATATGAGTTGGTGGAAA |
| | | | | AGTTTTATGATCCAATGTTTAAATATCACCTCACTGTGGCCCAGGTTCGAGGAGGGATGGTGTTT |
| | | | | GAACTAGCCAATTCCGTAGTGCTCCCTTTTGATTGTCGAGATTATGCTGTAGTTTTAAGAAAGTA |
| | | | | TGCTGACAAAATCTACAATATTTCTATGAAACATCCACAGGAAATGAAGACATACAGTGTATCAT |
| | | | | TTGATTCACTTTTTTCTGCAGTAAAGAATTTTACAGAAATTGCTTCCAAGTTCAGCGAGAGACTC |
| | | | | CGGGACTTTGACAAAAGCAACCCAATATTATTAAGAATGATGAATGATCAACTCATGTTTCTGGA |
| | | | | AAGAGCATTTATTGATCCATTAGGGTTACCAGACAGACCTTTTTATAGGCATGTCATCTATGCTC |
| | | | | CAAGCAGCCACAACAAGTATGCAGGGGAGTCATTCCCAGGAATTTATGATGCTCTGTTTGATATC |
| | | | | GAAAGCAAAGTGGACCCTTCCCAGGCCTGGGGAGAAGTGAAGAGACAGATTTCTGTTGCAACCTT |
| | | | | CACAGTGCAAGCAGCTGCAGAGACTTTGAGTGAAGTGGCCTAA |
| 386. | macaque PSMA | artificial | aa | MWNLLHETDSAVATARRPRWLCAGALVLAGGFFLLGFLFGWFIKSSSEATNITPKHNMKAFLDEL |
| | (Cynomolgus) | | | KAENIKKFLHNFTQIPHLAGTEQNFQLAKQIQSQWKEFGLDSVELTHYDVLLSYPNKTHPNYISI |
| | | | | INEDGNEIFNTSLFEPPPAGYENVSDIVPPFSAFSPQGMPEGDLVYVNYARTEDFFKLERDMKIN |
| | | | | CSGKIVIARYGKVFRGNKVKNAQLAGATGVILYSDPADYFAPGVKSYPDGWNLPGGGVQRGNILN |
| | | | | LNGAGDPLTPGYPANEYAYRRGMAEAVGLPSIPVHPIGYYDAQKLLEKMGGSASPDSSWRGSLKV |
| | | | | PYNVGPGFTGNFSTQKVKMHIHSTSEVTRIYNVIGTLRGAVEPDRYVILGGHRDSWVFGGIDPQS |
| | | | | GAAVVHEIVRSFGTLKKEGWRPRRTILFASWDAEEFGLLGSTEWAEENSRLLQERGVAYINADSS |
| | | | | IEGNYTLRVDCTPLMYSLVYNLTKELESPDEGFEGKSLYESWTKKSPSPEFSGMPRISKLGSGND |
| | | | | FEVFFQRLGIASGRARYTKNWETNKFSSYPLYHSVYETYELVEKFYDPMFKYHLTVAQVRGGMVF |
| | | | | ELANSVVLPFDCRDYAVVLRKYADKIYNISMKHPQEMKTYSVSFDSLFSAVKNFTEIASKFSERL |
| | | | | RDFDKSNPILLRMMNDQLMFLERAFIDPLGLPDRPFYRHVIYAPSSHNKYAGESFPGIYDALFDI |
| | | | | ESKVDPSQAWGEVKRQISVATFTVQAAAETLSEVA |
| 387. | PSMA-3 L | artificial | aa | DIQMTQSPKFMSTSVGDRVSVTCKASQNVDTNVAWYQQKPGQSPKALIYSASYRYSDVPDRFTGS |
| | | | | ESGTDFTLTISNVQSEDLAEYFCQQYDSYPYTFGGGTKLEIK |
| 388. | PSMA-3 L | artificial | nt | GACATCCAGATGACCCAGTCCCCCAAGTTCATGTCCACCTCCGTGGGCGACAGAGTGTCCGTGAC |
| | | | | CTGCAAGGCCTCCCAGAACGTGGACACCAACGTGGCCTGGTATCAGCAGAAGCCCGGCCAGTCCC |
| | | | | CTAAGGCCCTGATCTACTCCGCCTCCTACCGGTACTCTGACGTGCCTGACCGGTTCACCGGCTCC |
| | | | | GAGTCCGGCACCGACTTCACCCTGACCATCTCCAACGTGCAGTCTGAGGACCTGGCCGAGTACTT |
| | | | | CTGCCAGCAGTACGACTCCTACCCTTACACCTTCGGCGGAGGGACCAAGCTGGAAATCAAG |
| 389. | PSMA-3 LCDR1 | artificial | aa | KASQNVDTNVA |
| 390. | PSMA-3 LCDR2 | artificial | aa | SASYRYS |
| 391. | PSMA-3 LCDR3 | artificial | aa | QQYDSYPYT |
| 392. | PSMA-3 H | artificial | aa | DVKLVESGGGLVKPGESLKLSCIASGFTFSDYYMYWVRQTPEKRLEWVAIISDGGYYTYYSDIIK |
| | | | | GRFTISRDNAKNNLYLQMSSLKSEDTAMYYCTRGFPLLRHGAMDYWGLGTSVTVSS |
| 393. | PSMA-3 H | artificial | nt | GACGTGAAACTGGTGGAGTCTGGCGGCGGACTGGTGAAGCCTGGCGAGTCCCTGAAGCTGTCCTG |
| | | | | TATCGCCTCCGGCTTCACCTTCTCCGACTACTACATGTACTGGGTGCGCCAGACCCCTGAGAAGC |
| | | | | GGCTGGAATGGGTGGCCATCATCTCCGACGGCGGCTACTACACCTACTACTCCGACATCATCAAG |
| | | | | GGCCGGTTCACCATCTCCCGGGACAACGCCAAGAACAACCTGTACCTGCAGATGTCCTCCCTGAA |
| | | | | GTCCGAGGACACCGCCATGTACTACTGCACCCGGGGCTTCCCTCTGCTGAGACACGGCGCCATGG |
| | | | | ATTACTGGGGCCTGGGCACCTCTGTGACCGTGTCCTCT |
| 394. | PSMA-3 HCDR1 | artificial | aa | DYYMY |
| 395. | PSMA-3 HCDR2 | artificial | aa | IISDGGYYTYYSDIIKG |
| 396. | PSMA-3 HCDR3 | artificial | aa | GFPLLRHGAMDY |
| 397. | PSMA-3 HL | artificial | aa | DVKLVESGGGLVKPGESLKLSCIASGFTFSDYYMYWVRQTPEKRLEWVAIISDGGYYTYYSDIIK |
| | | | | GRFTISRDNAKNNLYLQMSSLKSEDTAMYYCTRGFPLLRHGAMDYWGLGTSVTVSSGGGGSGGGG |
| | | | | SGGGGSDIQMTQSPKFMSTSVGDRVSVTCKASQNVDTNVAWYQQKPGQSPKALIYSASYRYSDVP |
| | | | | DRFTGSESGTDFTLTISNVQSEDLAEYFCQQYDSYPYTFGGGTKLEIK |
| 398. | PSMA-3 HL | artificial | nt | GACGTGAAACTGGTGGAGTCTGGCGGCGGACTGGTGAAGCCTGGCGAGTCCCTGAAGCTGTCCTG |
| | | | | TATCGCCTCCGGCTTCACCTTCTCCGACTACTACATGTACTGGGTGCGCCAGACCCCTGAGAAGC |
| | | | | GGCTGGAATGGGTGGCCATCATCTCCGACGGCGGCTACTACACCTACTACTCCGACATCATCAAG |
| | | | | GGCCGGTTCACCATCTCCCGGGACAACGCCAAGAACAACCTGTACCTGCAGATGTCCTCCCTGAA |
| | | | | GTCCGAGGACACCGCCATGTACTACTGCACCCGGGGCTTCCCTCTGCTGAGACACGGCGCCATGG |
| | | | | ATTACTGGGGCCTGGGCACCTCTGTGACCGTGTCCTCTGGCGGAGGGGGCAGTGGAGGCGGAGGA |
| | | | | AGTGGAGGGGGCGGATCCGACATCCAGATGACCCAGTCCCCCAAGTTCATGTCCACCTCCGTGGG |
| | | | | CGACAGAGTGTCCGTGACCTGCAAGGCCTCCCAGAACGTGGACACCAACGTGGCCTGGTATCAGC |
| | | | | AGAAGCCCGGCCAGTCCCCTAAGGCCCTGATCTACTCCGCCTCCTACCGGTACTCTGACGTGCCT |
| | | | | GACCGGTTCACCGGCTCCGAGTCCGGCACCGACTTCACCCTGACCATCTCCAACGTGCAGTCTGA |
| | | | | GGACCTGGCCGAGTACTTCTGCCAGCAGTACGACTCCTACCCTTACACCTTCGGCGGAGGGACCA |
| | | | | AGCTGGAAATCAAG |
| 399. | PSMA-3 | artificial | aa | DVKLVESGGGLVKPGESLKLSCIASGFTFSDYYMYWVRQTPEKRLEWVAIISDGGYYTYYSDIIK |
| | HL x I2C HL | | | GRFTISRDNAKNNLYLQMSSLKSEDTAMYYCTRGFPLLRHGAMDYWGLGTSVTVSSGGGGSGGGG |
| | | | | SGGGGSDIQMTQSPKFMSTSVGDRVSVTCKASQNVDTNVAWYQQKPGQSPKALIYSASYRYSDVP |
| | | | | DRFTGSESGTDFTLTISNVQSEDLAEYFCQQYDSYPYTFGGGTKLEIKSGGGGSEVQLVESGGGL |
| | | | | VQPGGSLKLSCAASGFTFNKYAMNWVRQAPGKGLEWVARIRSKYNNYATYYADSVKDRFTISRDD |
| | | | | SKNTAYLQMNNLKTEDTAVYYCVRHGNFGNSYISYWAYWGQGTLVTVSSGGGGSGGGGSGGGGSQ |
| | | | | TVVTQEPSLTVSPGGTVTLTCGSSTGAVTSGNYPNWVQQKPGQAPRGLIGGTKFLAPGTPARFSG |
| | | | | SLLGGKAALTLSGVQPEDEAEYYCVLWYSNRWVFGGGTKLTVL |
| 400. | PSMA-3 | artificial | nt | GACGTGAAACTGGTGGAGTCTGGCGGCGGACTGGTGAAGCCTGGCGAGTCCCTGAAGCTGTCCTG |
| | HL x I2C HL | | | TATCGCCTCCGGCTTCACCTTCTCCGACTACTACATGTACTGGGTGCGCCAGACCCCTGAGAAGC |
| | | | | GGCTGGAATGGGTGGCCATCATCTCCGACGGCGGCTACTACACCTACTACTCCGACATCATCAAG |
| | | | | GGCCGGTTCACCATCTCCCGGGACAACGCCAAGAACAACCTGTACCTGCAGATGTCCTCCCTGAA |
| | | | | GTCCGAGGACACCGCCATGTACTACTGCACCCGGGGCTTCCCTCTGCTGAGACACGGCGCCATGG |
| | | | | ATTACTGGGGCCTGGGCACCTCTGTGACCGTGTCCTCTGGCGGAGGGGGCAGTGGAGGCGGAGGA |
| | | | | AGTGGAGGGGGCGGATCCGACATCCAGATGACCCAGTCCCCCAAGTTCATGTCCACCTCCGTGGG |
| | | | | CGACAGAGTGTCCGTGACCTGCAAGGCCTCCCAGAACGTGGACACCAACGTGGCCTGGTATCAGC |
| | | | | AGAAGCCCGGCCAGTCCCCTAAGGCCCTGATCTACTCCGCCTCCTACCGGTACTCTGACGTGCCT |
| | | | | GACCGGTTCACCGGCTCCGAGTCCGGCACCGACTTCACCCTGACCATCTCCAACGTGCAGTCTGA |
| | | | | GGACCTGGCCGAGTACTTCTGCCAGCAGTACGACTCCTACCCTTACACCTTCGGCGGAGGGACCA |
| | | | | AGCTGGAAATCAAGTCCGGAGGTGGTGGATCCGAGGTGCAGCTGGTCGAGTCTGGAGGAGGATTG |
| | | | | GTGCAGCCTGGAGGGTCATTGAAACTCTCATGTGCAGCCTCTGGATTCACCTTCAATAAGTACGC |
| | | | | CATGAACTGGGTCCGCCAGGCTCCAGGAAAGGGTTTGGAATGGGTTGCTCGCATAAGAAGTAAAT |
| | | | | ATAATAATTATGCAACATATTATGCCGATTCAGTGAAAGACAGGTTCACCATCTCCAGAGATGAT |
| | | | | TCAAAAAACACTGCCTATCTACAAATGAACAACTTGAAAACTGAGGACACTGCCGTGTACTACTG |
| | | | | TGTGAGACATGGGAACTTCGGTAATAGCTACATATCCTACTGGGCTTACTGGGGCCAAGGGACTC |
| | | | | TGGTCACCGTCTCCTCAGGTGGTGGTGGTTCTGGCGGCGGCGGCTCCGGTGGTGGTGGTTCTCAG |
| | | | | ACTGTTGTGACTCAGGAACCTTCACTCACCGTATCACCTGGTGGAACAGTCACACTCACTTGTGG |
| | | | | CTCCTCGACTGGGGCTGTTACATCTGGCAACTACCCAAACTGGGTCCAACAAAAACCAGGTCAGG |
| | | | | CACCCCGTGGTCTAATAGGTGGGACTAAGTTCCTCGCCCCCGGTACTCCTGCCAGATTCTCAGGC |
| | | | | TCCCTGCTTGGAGGCAAGGCTGCCCTCACCCTCTCAGGGGTACAGCCAGAGGATGAGGCAGAATA |
| | | | | TTACTGTGTTCTATGGTACAGCAACCGCTGGGTGTTCGGTGGAGGAACCAAACTGACTGTCCTA |
| 401. | PSMA-4 L | artificial | aa | DIELTQSPLSLPVILGDQASISCRSSQSLVHSNGNTYLHWFLQKPGQSPKLLIYTVSNRFSGVPD |
| | | | | RFSGSGSGTDFTLKISRVEAEDLGVYFCSQSTHVPTFGGGTKLEIK |
| 402. | PSMA-4 L | artificial | nt | GACATCGAGCTGACCCAGTCCCCCCTGTCCCTGCCTGTGATCCTGGGCGACCAGGCCTCCATCTC |
| | | | | CTGCCGGTCCTCCCAGTCCCTGGTGCACTCCAACGGCAATACCTACCTGCACTGGTTTCTGCAGA |
| | | | | AGCCTGGCCAGTCCCCTAAGCTGCTGATCTACACCGTGTCCAACCGGTTCTCCGGCGTGCCTGAC |
| | | | | AGGTTCTCTGGCTCCGGCTCCGGCACCGACTTCACCCTGAAGATCTCCCGGGTGGAGGCCGAAGA |
| | | | | TCTGGGCGTGTACTTTTGCTCCCAGTCCACCCACGTGCCTACCTTCGGCGGAGGGACCAAGCTGG |
| | | | | AAATCAAG |
| 403. | PSMA-4 LCDR1 | artificial | aa | RSSQSLVHSNGNTYLH |
| 404. | PSMA-4 LCDR2 | artificial | aa | TVSNRFS |
| 405. | PSMA-4 LCDR3 | artificial | aa | SQSTHVPT |
| 406. | PSMA-4 H | artificial | aa | QVQLQQSGAELVEPGASVKLSCKASGYTFTYFDINWLRQRPEQGLEWIGGISPGDGNTNYNENFK |
| | | | | GKATLTIDKSSTTAYIQLSRLTSEDSAVYFCARDGNFPYYAMDSWGQGTSVTVSS |
| 407. | PSMA-4 H | artificial | nt | CAGGTGCAGCTGCAGCAGTCTGGCGCCGAACTGGTGGAGCCTGGCGCCTCCGTGAAGCTGTCCTG |
| | | | | CAAGGCCTCCGGCTACACCTTCACCTACTTCGACATCAACTGGCTGCGGCAGAGGCCTGAGCAGG |
| | | | | GCCTGGAATGGATCGGCGGCATCTCCCCTGGCGACGGCAACACCAACTACAACGAGAACTTCAAG |
| | | | | GGCAAGGCCACCCTGACCATCGACAAGTCCTCCACCACCGCCTACATCCAGCTGTCCCGGCTGAC |
| | | | | CTCTGAGGACTCCGCCGTGTACTTCTGCGCCAGGGACGGCAACTTCCCTTACTACGCCATGGACT |
| | | | | CTTGGGGCCAGGGCACCTCCGTGACCGTGTCTAGT |
| 408. | PSMA-4 HCDR1 | artificial | aa | YFDIN |
| 409. | PSMA-4 HCDR2 | artificial | aa | GISPGDGNTNYNENFKG |
| 410. | PSMA-4 HCDR3 | artificial | aa | DGNFPYYAMDS |
| 411. | PSMA-4 HL | artificial | aa | QVQLQQSGAELVEPGASVKLSCKASGYTFTYFDINWLRQRPEQGLEWIGGISPGDGNTNYNENFK |
| | | | | GKATLTIDKSSTTAYIQLSRLTSEDSAVYFCARDGNFPYYAMDSWGQGTSVTVSSGGGGSGGGGS |
| | | | | GGGGSDIELTQSPLSLPVILGDQASISCRSSQSLVHSNGNTYLHWFLQKPGQSPKLLIYTVSNRF |
| | | | | SGVPDRFSGSGSGTDFTLKISRVEAEDLGVYFCSQSTHVPTFGGGTKLEIK |
| 412. | PSMA-4 HL | artificial | nt | CAGGTGCAGCTGCAGCAGTCTGGCGCCGAACTGGTGGAGCCTGGCGCCTCCGTGAAGCTGTCCTG |
| | | | | CAAGGCCTCCGGCTACACCTTCACCTACTTCGACATCAACTGGCTGCGGCAGAGGCCTGAGCAGG |
| | | | | GCCTGGAATGGATCGGCGGCATCTCCCCTGGCGACGGCAACACCAACTACAACGAGAACTTCAAG |
| | | | | GGCAAGGCCACCCTGACCATCGACAAGTCCTCCACCACCGCCTACATCCAGCTGTCCCGGCTGAC |
| | | | | CTCTGAGGACTCCGCCGTGTACTTCTGCGCCAGGGACGGCAACTTCCCTTACTACGCCATGGACT |
| | | | | CTTGGGGCCAGGGCACCTCCGTGACCGTGTCTAGTGGCGGCGGAGGATCTGGCGGAGGGGGATCT |
| | | | | GGGGGCGGAGGAAGCGACATCGAGCTGACCCAGTCCCCCCTGTCCCTGCCTGTGATCCTGGGCGA |
| | | | | CCAGGCCTCCATCTCCTGCCGGTCCTCCCAGTCCCTGGTGCACTCCAACGGCAATACCTACCTGC |
| | | | | ACTGGTTTCTGCAGAAGCCTGGCCAGTCCCCTAAGCTGCTGATCTACACCGTGTCCAACCGGTTC |
| | | | | TCCGGCGTGCCTGACAGGTTCTCTGGCTCCGGCTCCGGCACCGACTTCACCCTGAAGATCTCCCG |
| | | | | GGTGGAGGCCGAAGATCTGGGCGTGTACTTTTGCTCCCAGTCCACCCACGTGCCTACCTTCGGCG |
| | | | | GAGGGACCAAGCTGGAAATCAAG |
| 413. | PSMA-4 | artificial | aa | QVQLQQSGAELVEPGASVKLSCKASGYTFTYFDINWLRQRPEQGLEWIGGISPGDGNTNYNENFK |
| | HL x I2C HL | | | GKATLTIDKSSTTAYIQLSRLTSEDSAVYFCARDGNFPYYAMDSWGQGTSVTVSSGGGGSGGGGS |
| | | | | GGGGSDIELTQSPLSLPVILGDQASISCRSSQSLVHSNGNTYLHWFLQKPGQSPKLLIYTVSNRF |
| | | | | SGVPDRFSGSGSGTDFTLKISRVEAEDLGVYFCSQSTHVPTFGGGTKLEIKSGGGGSEVQLVESG |
| | | | | GGLVQPGGSLKLSCAASGFTFNKYAMNWVRQAPGKGLEWVARIRSKYNNYATYYADSVKDRFTIS |
| | | | | RDDSKNTAYLQMNNLKTEDTAVYYCVRHGNFGNSYISYWAYWGQGTLVTVSSGGGGSGGGGSGGG |
| | | | | GSQTVVTQEPSLTVSPGGTVTLTCGSSTGAVTSGNYPNWVQQKPGQAPRGLIGGTKFLAPGTPAR |
| | | | | FSGSLLGGKAALTLSGVQPEDEAEYYCVLWYSNRWVFGGGTKLTVL |
| 414. | PSMA-4 | artificial | nt | CAGGTGCAGCTGCAGCAGTCTGGCGCCGAACTGGTGGAGCCTGGCGCCTCCGTGAAGCTGTCCTG |
| | HL x I2C HL | | | CAAGGCCTCCGGCTACACCTTCACCTACTTCGACATCAACTGGCTGCGGCAGAGGCCTGAGCAGG |
| | | | | GCCTGGAATGGATCGGCGGCATCTCCCCTGGCGACGGCAACACCAACTACAACGAGAACTTCAAG |
| | | | | GGCAAGGCCACCCTGACCATCGACAAGTCCTCCACCACCGCCTACATCCAGCTGTCCCGGCTGAC |
| | | | | CTCTGAGGACTCCGCCGTGTACTTCTGCGCCAGGGACGGCAACTTCCCTTACTACGCCATGGACT |
| | | | | CTTGGGGCCAGGGCACCTCCGTGACCGTGTCTAGTGGCGGCGGAGGATCTGGCGGAGGGGGATCT |
| | | | | GGGGGCGGAGGAAGCGACATCGAGCTGACCCAGTCCCCCCTGTCCCTGCCTGTGATCCTGGGCGA |
| | | | | CCAGGCCTCCATCTCCTGCCGGTCCTCCCAGTCCCTGGTGCACTCCAACGGCAATACCTACCTGC |
| | | | | ACTGGTTTCTGCAGAAGCCTGGCCAGTCCCCTAAGCTGCTGATCTACACCGTGTCCAACCGGTTC |
| | | | | TCCGGCGTGCCTGACAGGTTCTCTGGCTCCGGCTCCGGCACCGACTTCACCCTGAAGATCTCCCG |
| | | | | GGTGGAGGCCGAAGATCTGGGCGTGTACTTTTGCTCCCAGTCCACCCACGTGCCTACCTTCGGCG |
| | | | | GAGGGACCAAGCTGGAAATCAAGTCCGGAGGTGGTGGATCCGAGGTGCAGCTGGTCGAGTCTGGA |
| | | | | GGAGGATTGGTGCAGCCTGGAGGGTCATTGAAACTCTCATGTGCAGCCTCTGGATTCACCTTCAA |
| | | | | TAAGTACGCCATGAACTGGGTCCGCCAGGCTCCAGGAAAGGGTTTGGAATGGGTTGCTCGCATAA |
| | | | | GAAGTAAATATAATAATTATGCAACATATTATGCCGATTCAGTGAAAGACAGGTTCACCATCTCC |
| | | | | AGAGATGATTCAAAAAACACTGCCTATCTACAAATGAACAACTTGAAAACTGAGGACACTGCCGT |
| | | | | GTACTACTGTGTGAGACATGGGAACTTCGGTAATAGCTACATATCCTACTGGGCTTACTGGGGCC |
| | | | | AAGGGACTCTGGTCACCGTCTCCTCAGGTGGTGGTGGTTCTGGCGGCGGCGGCTCCGGTGGTGGT |
| | | | | GGTTCTCAGACTGTTGTGACTCAGGAACCTTCACTCACCGTATCACCTGGTGGAACAGTCACACT |
| | | | | CACTTGTGGCTCCTCGACTGGGGCTGTTACATCTGGCAACTACCCAAACTGGGTCCAACAAAAAC |
| | | | | CAGGTCAGGCACCCCGTGGTCTAATAGGTGGGACTAAGTTCCTCGCCCCCGGTACTCCTGCCAGA |
| | | | | TTCTCAGGCTCCCTGCTTGGAGGCAAGGCTGCCCTCACCCTCTCAGGGGTACAGCCAGAGGATGA |
| | | | | GGCAGAATATTACTGTGTTCTATGGTACAGCAACCGCTGGGTGTTCGGTGGAGGAACCAAACTGA |
| | | | | CTGTCCTA |
| 415. | PSMA-6 L | artificial | aa | DIKMTQSPSSMYASLGERVTITCKASQDIYSYLIWFQQKPGKSPKTLIYRANRLVDGVPSRFSGS |
| | | | | GSGQDYSLTISSLEYEDMGIYYCLQYDEFATFGSGTKLEMK |
| 416. | PSMA-6 L | artificial | nt | GACATCAAGATGACCCAGTCCCCCTCCTCCATGTACGCCTCCCTGGGCGAGAGAGTGACCATCAC |
| | | | | CTGCAAGGCCTCCCAGGACATCTACTCCTACCTGATCTGGTTCCAGCAGAAGCCTGGCAAGTCCC |
| | | | | CTAAGACCCTGATCTACCGGGCCAACAGACTGGTGGACGGCGTGCCTTCCAGGTTCTCCGGCTCC |
| | | | | GGCTCTGGCCAGGACTACTCCCTGACCATCTCCTCCCTGGAATACGAGGACATGGGCATCTACTA |
| | | | | CTGCCTGCAGTACGACGAGTTCGCCACCTTCGGCTCCGGCACCAAGCTGGAAATGAAG |
| 417. | PSMA-6 LCDR1 | artificial | aa | KASQDIYSYLI |
| 418. | PSMA-6 LCDR2 | artificial | aa | RANRLVD |
| 419. | PSMA-6 LCDR3 | artificial | aa | LQYDEFAT |
| 420. | PSMA-6 H | artificial | aa | DVHLQESGPGLVKPSQSLSLTCTVTGYSITSDYAWNWIRQFPGNKLEWMGYISFSGSTSYNPSLK |
| | | | | SRISVTRDTSKNQFFLQLNSVTTEDTATYYCARWNYYGSSHVWFAYWGQGTLVTVSS |
| 421. | PSMA-6 H | artificial | nt | GACGTGCACCTGCAGGAATCTGGCCCTGGCCTGGTGAAGCCTTCCCAGTCCCTGTCCCTGACCTG |
| | | | | CACCGTGACCGGCTACTCCATCACCTCCGACTACGCCTGGAACTGGATCCGGCAGTTCCCTGGCA |
| | | | | ATAAGCTGGAATGGATGGGCTACATCTCCTTCTCCGGCAGCACCTCCTACAACCCTTCCCTGAAG |
| | | | | TCCCGGATCTCCGTGACCCGGGACACCTCCAAGAACCAGTTCTTCCTGCAGCTGAACTCCGTGAC |
| | | | | CACCGAGGACACCGCCACCTACTACTGCGCCCGGTGGAACTACTACGGCTCCTCCCACGTGTGGT |
| | | | | TCGCTTACTGGGGCCAGGGCACCCTGGTGACCGTGTCCTCC |
| 422. | PSMA-6 HCDR1 | artificial | aa | SDYAWN |
| 423. | PSMA-6 HCDR2 | artificial | aa | YISFSGSTSYNPSLKS |
| 424. | PSMA-6 HCDR3 | artificial | aa | WNYYGSSHVWFAY |
| 425. | PSMA-6 LH | artificial | aa | DIKMTQSPSSMYASLGERVTITCKASQDIYSYLIWFQQKPGKSPKTLIYRANRLVDGVPSRFSGS |
| | | | | GSGQDYSLTISSLEYEDMGIYYCLQYDEFATFGSGTKLEMKGGGGSGGGGSGGGGSDVHLQESGP |
| | | | | GLVKPSQSLSLTCTVTGYSITSDYAWNWIRQFPGNKLEWMGYISFSGSTSYNPSLKSRISVTRDT |
| | | | | SKNQFFLQLNSVTTEDTATYYCARWNYYGSSHVWFAYWGQGTLVTVSS |
| 426. | PSMA-6 LH | artificial | nt | GACATCAAGATGACCCAGTCCCCCTCCTCCATGTACGCCTCCCTGGGCGAGAGAGTGACCATCAC |
| | | | | CTGCAAGGCCTCCCAGGACATCTACTCCTACCTGATCTGGTTCCAGCAGAAGCCTGGCAAGTCCC |
| | | | | CTAAGACCCTGATCTACCGGGCCAACAGACTGGTGGACGGCGTGCCTTCCAGGTTCTCCGGCTCC |
| | | | | GGCTCTGGCCAGGACTACTCCCTGACCATCTCCTCCCTGGAATACGAGGACATGGGCATCTACTA |
| | | | | CTGCCTGCAGTACGACGAGTTCGCCACCTTCGGCTCCGGCACCAAGCTGGAAATGAAGGGCGGAG |
| | | | | GGGGATCTGGCGGCGGAGGAAGTGGCGGGGGAGGATCCGACGTGCACCTGCAGGAATCTGGCCCT |
| | | | | GGCCTGGTGAAGCCTTCCCAGTCCCTGTCCCTGACCTGCACCGTGACCGGCTACTCCATCACCTC |
| | | | | CGACTACGCCTGGAACTGGATCCGGCAGTTCCCTGGCAATAAGCTGGAATGGATGGGCTACATCT |
| | | | | CCTTCTCCGGCAGCACCTCCTACAACCCTTCCCTGAAGTCCCGGATCTCCGTGACCCGGGACACC |
| | | | | TCCAAGAACCAGTTCTTCCTGCAGCTGAACTCCGTGACCACCGAGGACACCGCCACCTACTACTG |
| | | | | CGCCCGGTGGAACTACTACGGCTCCTCCCACGTGTGGTTCGCTTACTGGGGCCAGGGCACCCTGG |
| | | | | TGACCGTGTCCTCC |
| 427. | PSMA-6 | artificial | aa | DIKMTQSPSSMYASLGERVTITCKASQDIYSYLIWFQQKPGKSPKTLIYRANRLVDGVPSRFSGS |
| | LH x I2C HL | | | GSGQDYSLTISSLEYEDMGIYYCLQYDEFATFGSGTKLEMKGGGGSGGGGSGGGGSDVHLQESGP |
| | | | | GLVKPSQSLSLTCTVTGYSITSDYAWNWIRQFPGNKLEWMGYISFSGSTSYNPSLKSRISVTRDT |
| | | | | SKNQFFLQLNSVTTEDTATYYCARWNYYGSSHVWFAYWGQGTLVTVSSGGGGSEVQLVESGGGLV |
| | | | | QPGGSLKLSCAASGFTFNKYAMNWVRQAPGKGLEWVARIRSKYNNYATYYADSVKDRFTISRDDS |
| | | | | KNTAYLQMNNLKTEDTAVYYCVRHGNFGNSYISYWAYWGQGTLVTVSSGGGGSGGGGSGGGGSQT |
| | | | | VVTQEPSLTVSPGGTVTLTCGSSTGAVTSGNYPNWVQQKPGQAPRGLIGGTKFLAPGTPARFSGS |
| | | | | LLGGKAALTLSGVQPEDEAEYYCVLWYSNRWVFGGGTKLTVL |
| 428. | PSMA-6 | artificial | nt | GACATCAAGATGACCCAGTCCCCCTCCTCCATGTACGCCTCCCTGGGCGAGAGAGTGACCATCAC |
| | LH x I2C HL | | | CTGCAAGGCCTCCCAGGACATCTACTCCTACCTGATCTGGTTCCAGCAGAAGCCTGGCAAGTCCC |
| | | | | CTAAGACCCTGATCTACCGGGCCAACAGACTGGTGGACGGCGTGCCTTCCAGGTTCTCCGGCTCC |
| | | | | GGCTCTGGCCAGGACTACTCCCTGACCATCTCCTCCCTGGAATACGAGGACATGGGCATCTACTA |
| | | | | CTGCCTGCAGTACGACGAGTTCGCCACCTTCGGCTCCGGCACCAAGCTGGAAATGAAGGGCGGAG |
| | | | | GGGGATCTGGCGGCGGAGGAAGTGGCGGGGGAGGATCCGACGTGCACCTGCAGGAATCTGGCCCT |
| | | | | GGCCTGGTGAAGCCTTCCCAGTCCCTGTCCCTGACCTGCACCGTGACCGGCTACTCCATCACCTC |
| | | | | CGACTACGCCTGGAACTGGATCCGGCAGTTCCCTGGCAATAAGCTGGAATGGATGGGCTACATCT |
| | | | | CCTTCTCCGGCAGCACCTCCTACAACCCTTCCCTGAAGTCCCGGATCTCCGTGACCCGGGACACC |
| | | | | TCCAAGAACCAGTTCTTCCTGCAGCTGAACTCCGTGACCACCGAGGACACCGCCACCTACTACTG |
| | | | | CGCCCGGTGGAACTACTACGGCTCCTCCCACGTGTGGTTCGCTTACTGGGGCCAGGGCACCCTGC |
| | | | | TGACCGTGTCCTCCGGAGGTGGTGGATCCGAGGTGCAGCTGGTCGAGTCTGGAGGAGGATTGGTG |
| | | | | CAGCCTGGAGGGTCATTGAAACTCTCATGTGCAGCCTCTGGATTCACCTTCAATAAGTACGCCAT |
| | | | | GAACTGGGTCCGCCAGGCTCCAGGAAAGGGTTTGGAATGGGTTGCTCGCATAAGAAGTAAATATA |
| | | | | ATAATTATGCAACATATTATGCCGATTCAGTGAAAGACAGGTTCACCATCTCCAGAGATGATTCA |
| | | | | AAAAACACTGCCTATCTACAAATGAACAACTTGAAAACTGAGGACACTGCCGTGTACTACTGTGT |
| | | | | GAGACATGGGAACTTCGGTAATAGCTACATATCCTACTGGGCTTACTGGGGCCAAGGGACTCTGG |
| | | | | TCACCGTCTCCTCAGGTGGTGGTGGTTCTGGCGGCGGCGGCTCCGGTGGTGGTGGTTCTCAGACT |
| | | | | GTTGTGACTCAGGAACCTTCACTCACCGTATCACCTGGTGGAACAGTCACACTCACTTGTGGCTC |
| | | | | CTCGACTGGGGCTGTTACATCTGGCAACTACCCAAACTGGGTCCAACAAAAACCAGGTCAGGCAC |
| | | | | CCCGTGGTCTAATAGGTGGGACTAAGTTCCTCGCCCCCGGTACTCCTGCCAGATTCTCAGGCTCC |
| | | | | CTGCTTGGAGGCAAGGCTGCCCTCACCCTCTCAGGGGTACAGCCAGAGGATGAGGCAGAATATTA |
| | | | | CTGTGTTCTATGGTACAGCAACCGCTGGGTGTTCGGTGGAGGAACCAAACTGACTGTCCTA |
| 429. | PSMA-7 L | artificial | aa | DIVMTQSHKFMSTSVGDRVSIICKASQDVGTAVDWYQQKPGQSPKLLIYWASTRHTGVPDRFTGS |
| | | | | GSGTDFTLTITNVQSEDLADYFCQQYNSYPLTFGAGTMLDLK |
| 430. | PSMA-7 L | artificial | nt | GACATCGTGATGACCCAGTCCCACAAGTTCATGTCCACCTCCGTGGGCGACCGGGTGTCCATCAT |
| | | | | CTGCAAGGCCTCCCAGGATGTGGGCACCGCCGTGGACTGGTATCAGCAGAAGCCTGGCCAGTCCC |
| | | | | CTAAGCTGCTGATCTACTGGGCCTCCACCAGACACACCGGCGTGCCTGACAGATTCACCGGCTCC |
| | | | | GGCTCTGGCACCGACTTCACCCTGACCATCACCAACGTGCAGTCCGAGGACCTGGCCGACTACTT |
| | | | | CTGCCAGCAGTACAACTCCTACCCTCTGACCTTCGGCGCTGGCACCATGCTGGACCTGAAG |
| 431. | PSMA-7 LCDR1 | artificial | aa | KASQDVGTAVD |
| 432. | PSMA-7 LCDR2 | artificial | aa | WASTRHT |
| 433. | PSMA-7 LCDR3 | artificial | aa | QQYNSYPLT |
| 434. | PSMA-7 H | artificial | aa | EVQLQQSGPELVKPGTSVRISCKTSGYTFTEYTIHWVKQSHGKSLEWIGNINPNNGGTTYNQKFE |
| | | | | DKATLTVDKSSSTAYMELRSLTSEDSAVYYCAAGWNFDYWGQGTTLTVSS |
| 435. | PSMA-7 H | artificial | nt | GAAGTGCAGCTGCAGCAGTCCGGCCCTGAGCTGGTGAAGCCTGGCACCTCCGTGCGGATCTCTTG |
| | | | | CAAGACCTCCGGCTACACCTTCACCGAGTACACCATCCACTGGGTGAAACAGTCCCACGGCAAGT |
| | | | | CCCTGGAATGGATCGGCAACATCAACCCTAACAACGGCGGCACCACCTACAACCAGAAGTTCGAG |
| | | | | GACAAGGCCACCCTGACCGTGGACAAGTCCTCCTCCACCGCCTACATGGAACTGCGGTCCCTGAC |
| | | | | CTCCGAGGACTCCGCCGTGTACTACTGCGCCGCTGGCTGGAACTTCGACTACTGGGGCCAGGGCA |
| | | | | CCACACTGACCGTGTCCTCC |
| 436. | PSMA-7 HCDR1 | artificial | aa | EYTIH |
| 437. | PSMA-7 HCDR2 | artificial | aa | NINPNNGGTTYNQKFED |
| 438. | PSMA-7 HCDR3 | artificial | aa | GWNFDY |
| 439. | PSMA-7 LH | artificial | aa | DIVMTQSHKFMSTSVGDRVSIICKASQDVGTAVDWYQQKPGQSPKLLIYWASTRHTGVPDRFTGS |
| | | | | GSGTDFTLTITNVQSEDLADYFCQQYNSYPLTFGAGTMLDLKGGGGSGGGGSGGGGSEVQLQQSG |
| | | | | PELVKPGTSVRISCKTSGYTFTEYTIHWVKQSHGKSLEWIGNINPNNGGTTYNQKFEDKATLTVD |
| | | | | KSSSTAYMELRSLTSEDSAVYYCAAGWNFDYWGQGTTLTVSS |
| 440. | PSMA-7 LH | artificial | nt | GACATCGTGATGACCCAGTCCCACAAGTTCATGTCCACCTCCGTGGGCGACCGGGTGTCCATCAT |
| | | | | CTGCAAGGCCTCCCAGGATGTGGGCACCGCCGTGGACTGGTATCAGCAGAAGCCTGGCCAGTCCC |
| | | | | CTAAGCTGCTGATCTACTGGGCCTCCACCAGACACACCGGCGTGCCTGACAGATTCACCGGCTCC |
| | | | | GGCTCTGGCACCGACTTCACCCTGACCATCACCAACGTGCAGTCCGAGGACCTGGCCGACTACTT |
| | | | | CTGCCAGCAGTACAACTCCTACCCTCTGACCTTCGGCGCTGGCACCATGCTGGACCTGAAGGGCG |
| | | | | GAGGGGGCTCTGGCGGCGGAGGAAGTGGAGGGGGCGGATCCGAAGTGCAGCTGCAGCAGTCCGGC |
| | | | | CCTGAGCTGGTGAAGCCTGGCACCTCCGTGCGGATCTCTTGCAAGACCTCCGGCTACACCTTCAC |
| | | | | CGAGTACACCATCCACTGGGTGAAACAGTCCCACGGCAAGTCCCTGGAATGGATCGGCAACATCA |
| | | | | ACCCTAACAACGGCGGCACCACCTACAACCAGAAGTTCGAGGACAAGGCCACCCTGACCGTGGAC |
| | | | | AAGTCCTCCTCCACCGCCTACATGGAACTGCGGTCCCTGACCTCCGAGGACTCCGCCGTGTACTA |
| | | | | CTGCGCCGCTGGCTGGAACTTCGACTACTGGGGCCAGGGCACCACACTGACCGTGTCCTCC |
| 441. | PSMA-7 | artificial | aa | DIVMTQSHKFMSTSVGDRVSIICKASQDVGTAVDWYQQKPGQSPKLLIYWASTRHTGVPDRFTGS |
| | LH x I2C HL | | | GSGTDFTLTITNVQSEDLADYFCQQYNSYPLTFGAGTMLDLKGGGGSGGGGSGGGGSEVQLQQSG |
| | | | | PELVKPGTSVRISCKTSGYTFTEYTIHWVKQSHGKSLEWIGNINPNNGGTTYNQKFEDKATLTVD |
| | | | | KSSSTAYMELRSLTSEDSAVYYCAAGWNFDYWGQGTTLTVSSGGGGSEVQLVESGGGLVQPGGSL |
| | | | | KLSCAASGFTFNKYAMNWVRQAPGKGLEWVARIRSKYNNYATYYADSVKDRFTISRDDSKNTAYL |
| | | | | QMNNLKTEDTAVYYCVRHGNFGNSYISYWAYWGQGTLVTVSSGGGGSGGGGSGGGGSQTVVTQEP |
| | | | | SLTVSPGGTVTLTCGSSTGAVTSGNYPNWVQQKPGQAPRGLIGGTKFLAPGTPARFSGSLLGGKA |
| | | | | ALTLSGVQPEDEAEYYCVLWYSNRWVFGGGTKLTVL |
| 442. | PSMA-7 | artificial | nt | GACATCGTGATGACCCAGTCCCACAAGTTCATGTCCACCTCCGTGGGCGACCGGGTGTCCATCAT |
| | LH x I2C HL | | | CTGCAAGGCCTCCCAGGATGTGGGCACCGCCGTGGACTGGTATCAGCAGAAGCCTGGCCAGTCCC |
| | | | | CTAAGCTGCTGATCTACTGGGCCTCCACCAGACACACCGGCGTGCCTGACAGATTCACCGGCTCC |
| | | | | GGCTCTGGCACCGACTTCACCCTGACCATCACCAACGTGCAGTCCGAGGACCTGGCCGACTACTT |
| | | | | CTGCCAGCAGTACAACTCCTACCCTCTGACCTTCGGCGCTGGCACCATGCTGGACCTGAAGGGCG |
| | | | | GAGGGGGCTCTGGCGGCGGAGGAAGTGGAGGGGGCGGATCCGAAGTGCAGCTGCAGCAGTCCGGC |
| | | | | CCTGAGCTGGTGAAGCCTGGCACCTCCGTGCGGATCTCTTGCAAGACCTCCGGCTACACCTTCAC |
| | | | | CGAGTACACCATCCACTGGGTGAAACAGTCCCACGGCAAGTCCCTGGAATGGATCGGCAACATCA |
| | | | | ACCCTAACAACGGCGGCACCACCTACAACCAGAAGTTCGAGGACAAGGCCACCCTGACCGTGGAC |
| | | | | AAGTCCTCCTCCACCGCCTACATGGAACTGCGGTCCCTGACCTCCGAGGACTCCGCCGTGTACTA |
| | | | | CTGCGCCGCTGGCTGGAACTTCGACTACTGGGGCCAGGGCACCACACTGACCGTGTCCTCCGGAG |
| | | | | GTGGTGGATCCGAGGTGCAGCTGGTCGAGTCTGGAGGAGGATTGGTGCAGCCTGGAGGGTCATTG |
| | | | | AAACTCTCATGTGCAGCCTCTGGATTCACCTTCAATAAGTACGCCATGAACTGGGTCCGCCAGGC |
| | | | | TCCAGGAAAGGGTTTGGAATGGGTTGCTCGCATAAGAAGTAAATATAATAATTATGCAACATATT |
| | | | | ATGCCGATTCAGTGAAAGACAGGTTCACCATCTCCAGAGATGATTCAAAAAACACTGCCTATCTA |
| | | | | CAAATGAACAACTTGAAAACTGAGGACACTGCCGTGTACTACTGTGTGAGACATGGGAACTTCGG |
| | | | | TAATAGCTACATATCCTACTGGGCTTACTGGGGCCAAGGGACTCTGGTCACCGTCTCCTCAGGTG |
| | | | | GTGGTGGTTCTGGCGGCGGCGGCTCCGGTGGTGGTGGTTCTCAGACTGTTGTGACTCAGGAACCT |
| | | | | TCACTCACCGTATCACCTGGTGGAACAGTCACACTCACTTGTGGCTCCTCGACTGGGGCTGTTAC |
| | | | | ATCTGGCAACTACCCAAACTGGGTCCAACAAAAACCAGGTCAGGCACCCCGTGGTCTAATAGGTG |
| | | | | GGACTAAGTTCCTCGCCCCCGGTACTCCTGCCAGATTCTCAGGCTCCCTGCTTGGAGGCAAGGCT |
| | | | | GCCCTCACCCTCTCAGGGGTACAGCCAGAGGATGAGGCAGAATATTACTGTGTTCTATGGTACAG |
| | | | | CAACCGCTGGGTGTTCGGTGGAGGAACCAAACTGACTGTCCTA |
| 443. | PSMA-8 L | artificial | aa | DIVLTQSPASLAVSLGQRATISCRASESIDSYDNTFMHWYQQKPGQPPNLLIFRASILESGIPAR |
| | | | | FSGSGSGTDFTLTIYPVEADDVATYYCHQSIEDPYTFGGGTKLEIK |
| 444. | PSMA-8 L | artificial | nt | GACATCGTGCTGACCCAGTCTCCAGCCTCCCTGGCTGTGTCTCTGGGCCAGCGGGCCACCATCTC |
| | | | | TTGCCGGGCCTCCGAGTCCATCGACTCCTACGACAACACCTTCATGCACTGGTATCAGCAGAAGC |
| | | | | CTGGCCAGCCTCCTAACCTGCTGATCTTCCGGGCCTCTATCCTGGAATCCGGCATCCCTGCCCGG |
| | | | | TTCTCCGGCTCTGGCTCCGGCACCGACTTCACCCTGACCATCTACCCTGTGGAGGCCGACGACGT |
| | | | | GGCCACCTACTACTGCCACCAGTCCATCGAGGACCCTTACACCTTCGGCGGAGGGACCAAGCTGG |
| | | | | AAATCAAG |
| 445. | PSMA-8 LCDR1 | artificial | aa | RASESIDSYDNTFMH |
| 446. | PSMA-8 LCDR2 | artificial | aa | RASILES |
| 447. | PSMA-8 LCDR3 | artificial | aa | HQSIEDPYT |
| 448. | PSMA-8 H | artificial | aa | EVQLQQSGPELVKPGASVKMSCKASGYTFTGYVMHWVKQKPGQVLEWIGYINPYNDVTRYNGKFK |
| | | | | GKATLTSDKYSSTAYMELSGLTSEDSAVYYCARGENWYYFDSWGRGATLTVSS |
| 449. | PSMA-8 H | artificial | nt | GAAGTGCAGCTGCAGCAGTCCGGCCCTGAGCTGGTGAAGCCTGGCGCCTCCGTGAAGATGTCCTG |
| | | | | CAAGGCCTCCGGCTACACCTTCACCGGCTACGTGATGCACTGGGTGAAACAGAAACCCGGCCAGG |
| | | | | TGCTGGAATGGATCGGCTACATCAACCCTTACAACGACGTGACCCGGTACAACGGCAAGTTCAAG |
| | | | | GGCAAGGCCACCCTGACCTCCGACAAGTACTCCTCCACCGCCTACATGGAACTGTCCGGCCTGAC |
| | | | | CTCTGAGGACTCCGCCGTGTACTACTGCGCCAGGGGCGAGAACTGGTACTACTTCGACTCCTGGG |
| | | | | GCAGAGGCGCTACCCTGACCGTGTCTTCC |
| 450. | PSMA-8 HCDR1 | artificial | aa | GYVMH |
| 451. | PSMA-8 HCDR2 | artificial | aa | YINPYNDVTRYNGKFKG |
| 452. | PSMA-8 HCDR3 | artificial | aa | GENWYYFDS |
| 453. | PSMA-8 LH | artificial | aa | DIVLTQSPASLAVSLGQRATISCRASESIDSYDNTFMHWYQQKPGQPPNLLIFRASILESGIPAR |
| | | | | FSGSGSGTDFTLTIYPVEADDVATYYCHQSIEDPYTFGGGTKLEIKGGGGSGGGGSGGGGSEVQL |
| | | | | QQSGPELVKPGASVKMSCKASGYTFTGYVMHWVKQKPGQVLEWIGYINPYNDVTRYNGKFKGKAT |
| | | | | LTSDKYSSTAYMELSGLTSEDSAVYYCARGENWYYFDSWGRGATLTVSS |
| 454. | PSMA-8 LH | artificial | nt | GACATCGTGCTGACCCAGTCTCCAGCCTCCCTGGCTGTGTCTCTGGGCCAGCGGGCCACCATCTC |
| | | | | TTGCCGGGCCTCCGAGTCCATCGACTCCTACGACAACACCTTCATGCACTGGTATCAGCAGAAGC |
| | | | | CTGGCCAGCCTCCTAACCTGCTGATCTTCCGGGCCTCTATCCTGGAATCCGGCATCCCTGCCCGG |
| | | | | TTCTCCGGCTCTGGCTCCGGCACCGACTTCACCCTGACCATCTACCCTGTGGAGGCCGACGACGT |
| | | | | GGCCACCTACTACTGCCACCAGTCCATCGAGGACCCTTACACCTTCGGCGGAGGGACCAAGCTGG |
| | | | | AAATCAAGGGCGGAGGGGGATCTGGCGGCGGAGGAAGTGGAGGGGGCGGATCCGAAGTGCAGCTG |
| | | | | CAGCAGTCCGGCCCTGAGCTGGTGAAGCCTGGCGCCTCCGTGAAGATGTCCTGCAAGGCCTCCGG |
| | | | | CTACACCTTCACCGGCTACGTGATGCACTGGGTGAAACAGAAACCCGGCCAGGTGCTGGAATGGA |
| | | | | TCGGCTACATCAACCCTTACAACGACGTGACCCGGTACAACGGCAAGTTCAAGGGCAAGGCCACC |
| | | | | CTGACCTCCGACAAGTACTCCTCCACCGCCTACATGGAACTGTCCGGCCTGACCTCTGAGGACTC |
| | | | | CGCCGTGTACTACTGCGCCAGGGGCGAGAACTGGTACTACTTCGACTCCTGGGGCAGAGGCGCTA |
| | | | | CCCTGACCGTGTCTTCC |
| 455. | PSMA-8 | artificial | aa | DIVLTQSPASLAVSLGQRATISCRASESIDSYDNTFMHWYQQKPGQPPNLLIFRASILESGIPAR |
| | LH x I2C HL | | | FSGSGSGTDFTLTIYPVEADDVATYYCHQSIEDPYTFGGGTKLEIKGGGGSGGGGSGGGGSEVQL |
| | | | | QQSGPELVKPGASVKMSCKASGYTFTGYVMHWVKQKPGQVLEWIGYINPYNDVTRYNGKFKGKAT |
| | | | | LTSDKYSSTAYMELSGLTSEDSAVYYCARGENWYYFDSWGRGATLTVSSGGGGSEVQLVESGGGL |
| | | | | VQPGGSLKLSCAASGFTFNKYAMNWVRQAPGKGLEWVARIRSKYNNYATYYADSVKDRFTISRDD |
| | | | | SKNTAYLQMNNLKTEDTAVYYCVRHGNFGNSYISYWAYWGQGTLVTVSSGGGGSGGGGSGGGGSQ |
| | | | | TVVTQEPSLTVSPGGTVTLTCGSSTGAVTSGNYPNWVQQKPGQAPRGLIGGTKFLAPGTPARFSG |
| | | | | SLLGGKAALTLSGVQPEDEAEYYCVLWYSNRWVFGGGTKLTVL |
| 456. | PSMA-8 | artificial | nt | GACATCGTGCTGACCCAGTCTCCAGCCTCCCTGGCTGTGTCTCTGGGCCAGCGGGCCACCATCTC |
| | LH x I2C HL | | | TTGCCGGGCCTCCGAGTCCATCGACTCCTACGACAACACCTTCATGCACTGGTATCAGCAGAAGC |
| | | | | CTGGCCAGCCTCCTAACCTGCTGATCTTCCGGGCCTCTATCCTGGAATCCGGCATCCCTGCCCGG |
| | | | | TTCTCCGGCTCTGGCTCCGGCACCGACTTCACCCTGACCATCTACCCTGTGGAGGCCGACGACGT |
| | | | | GGCCACCTACTACTGCCACCAGTCCATCGAGGACCCTTACACCTTCGGCGGAGGGACCAAGCTGG |
| | | | | AAATCAAGGGCGGAGGGGGATCTGGCGGCGGAGGAAGTGGAGGGGGCGGATCCGAAGTGCAGCTG |
| | | | | CAGCAGTCCGGCCCTGAGCTGGTGAAGCCTGGCGCCTCCGTGAAGATGTCCTGCAAGGCCTCCGG |
| | | | | CTACACCTTCACCGGCTACGTGATGCACTGGGTGAAACAGAAACCCGGCCAGGTGCTGGAATGGA |
| | | | | TCGGCTACATCAACCCTTACAACGACGTGACCCGGTACAACGGCAAGTTCAAGGGCAAGGCCACC |
| | | | | CTGACCTCCGACAAGTACTCCTCCACCGCCTACATGGAACTGTCCGGCCTGACCTCTGAGGACTC |
| | | | | CGCCGTGTACTACTGCGCCAGGGGCGAGAACTGGTACTACTTCGACTCCTGGGGCAGAGGCGCTA |
| | | | | CCCTGACCGTGTCTTCCGGAGGTGGTGGATCCGAGGTGCAGCTGGTCGAGTCTGGAGGAGGATTG |
| | | | | GTGCAGCCTGGAGGGTCATTGAAACTCTCATGTGCAGCCTCTGGATTCACCTTCAATAAGTACGC |
| | | | | CATGAACTGGGTCCGCCAGGCTCCAGGAAAGGGTTTGGAATGGGTTGCTCGCATAAGAAGTAAAT |
| | | | | ATAATAATTATGCAACATATTATGCCGATTCAGTGAAAGACAGGTTCACCATCTCCAGAGATGAT |
| | | | | TCAAAAAACACTGCCTATCTACAAATGAACAACTTGAAAACTGAGGACACTGCCGTGTACTACTG |
| | | | | TGTGAGACATGGGAACTTCGGTAATAGCTACATATCCTACTGGGCTTACTGGGGCCAAGGGACTC |
| | | | | TGGTCACCGTCTCCTCAGGTGGTGGTGGTTCTGGCGGCGGCGGCTCCGGTGGTGGTGGTTCTCAG |
| | | | | ACTGTTGTGACTCAGGAACCTTCACTCACCGTATCACCTGGTGGAACAGTCACACTCACTTGTGG |
| | | | | CTCCTCGACTGGGGCTGTTACATCTGGCAACTACCCAAACTGGGTCCAACAAAAACCAGGTCAGG |
| | | | | CACCCCGTGGTCTAATAGGTGGGACTAAGTTCCTCGCCCCCGGTACTCCTGCCAGATTCTCAGGC |
| | | | | TCCCTGCTTGGAGGCAAGGCTGCCCTCACCCTCTCAGGGGTACAGCCAGAGGATGAGGCAGAATA |
| | | | | TTACTGTGTTCTATGGTACAGCAACCGCTGGGTGTTCGGTGGAGGAACCAAACTGACTGTCCTA |
| 457. | PSMA-9 L | artificial | aa | NIVMTQSQKFMSTSPGDRVRVTCKASQNVGSDVAWYQAKPGQSPRILIYSTSYRYSGVPDRFTAY |
| | | | | GSGTDFTLTITNVQSEDLTEYFCQQYNSYPLTFGAGTKLELK |
| 458. | PSMA-9 L | artificial | nt | AACATCGTGATGACCCAGTCCCAGAAATTCATGTCCACCTCTCCCGGCGATAGAGTGCGCGTGAC |
| | | | | CTGCAAGGCCTCCCAGAACGTGGGCTCCGACGTGGCCTGGTATCAGGCCAAGCCTGGCCAGTCCC |
| | | | | CTCGGATCCTGATCTACTCCACCTCCTACCGGTACTCCGGCGTGCCTGACAGATTCACCGCCTAC |
| | | | | GGCTCCGGCACCGACTTCACCCTGACCATTACAAACGTGCAGTCCGAGGACCTGACCGAGTACTT |
| | | | | CTGCCAGCAGTACAACTCCTACCCTCTGACCTTCGGCGCTGGCACCAAGCTGGAACTGAAG |
| 459. | PSMA-9 LCDR1 | artificial | aa | KASQNVGSDVA |
| 460. | PSMA-9 LCDR2 | artificial | aa | STSYRYS |
| 461. | PSMA-9 LCDR3 | artificial | aa | QQYNSYPLT |
| 462. | PSMA-9 H | artificial | aa | QVQLKESGPGLVASSQSLSITCTVSGFSLTAYGINWVRQPPGKGLEWLGVIWPDGNTDYNSTLKS |
| | | | | RLNIFKDNSKNQVFLKMSSFQTDDTARYFCARDSYGNFKRGWFDFWGQGTTLTVSS |
| 463. | PSMA-9 H | artificial | nt | CAGGTGCAGCTGAAAGAGTCCGGCCCTGGCCTGGTGGCCTCCTCCCAGTCCCTGTCCATCACCTG |
| | | | | CACCGTGTCAGGCTTCTCCCTGACCGCTTACGGCATCAACTGGGTGCGCCAGCCTCCTGGCAAGG |
| | | | | GCCTGGAATGGCTGGGCGTGATCTGGCCTGACGGCAACACCGACTACAACAGCACCCTGAAGTCC |
| | | | | CGGCTGAACATCTTCAAGGACAACTCCAAGAACCAGGTGTTCCTGAAGATGTCCTCTTTCCAGAC |
| | | | | CGACGACACCGCCCGGTACTTTTGCGCCAGGGACTCCTACGGCAACTTCAAGCGGGGCTGGTTCG |
| | | | | ATTTTTGGGGCCAGGGCACCACACTGACCGTGTCCTCC |
| 464. | PSMA-9 HCDR1 | artificial | aa | AYGIN |
| 465. | PSMA-9 HCDR2 | artificial | aa | VIWPDGNTDYNSTLKS |
| 466. | PSMA-9 HCDR3 | artificial | aa | DSYGNFKRGWFDF |
| 467. | PSMA-9 LH | artificial | aa | NIVMTQSQKFMSTSPGDRVRVTCKASQNVGSDVAWYQAKPGQSPRILIYSTSYRYSGVPDRFTAY |
| | | | | GSGTDFTLTITNVQSEDLTEYFCQQYNSYPLTFGAGTKLELKGGGGSGGGGSGGGGSQVQLKESG |
| | | | | PGLVASSQSLSITCTVSGFSLTAYGINWVRQPPGKGLEWLGVIWPDGNTDYNSTLKSRLNIFKDN |
| | | | | SKNQVFLKMSSFQTDDTARYFCARDSYGNFKRGWFDFWGQGTTLTVSS |
| 468. | PSMA-9 LH | artificial | nt | AACATCGTGATGACCCAGTCCCAGAAATTCATGTCCACCTCTCCCGGCGATAGAGTGCGCGTGAC |
| | | | | CTGCAAGGCCTCCCAGAACGTGGGCTCCGACGTGGCCTGGTATCAGGCCAAGCCTGGCCAGTCCC |
| | | | | CTCGGATCCTGATCTACTCCACCTCCTACCGGTACTCCGGCGTGCCTGACAGATTCACCGCCTAC |
| | | | | GGCTCCGGCACCGACTTCACCCTGACCATTACAAACGTGCAGTCCGAGGACCTGACCGAGTACTT |
| | | | | CTGCCAGCAGTACAACTCCTACCCTCTGACCTTCGGCGCTGGCACCAAGCTGGAACTGAAGGGCG |
| | | | | GAGGGGGCTCTGGCGGCGGAGGAAGTGGAGGGGGCGGATCTCAGGTGCAGCTGAAAGAGTCCGGC |
| | | | | CCTGGCCTGGTGGCCTCCTCCCAGTCCCTGTCCATCACCTGCACCGTGTCAGGCTTCTCCCTGAC |
| | | | | CGCTTACGGCATCAACTGGGTGCGCCAGCCTCCTGGCAAGGGCCTGGAATGGCTGGGCGTGATCT |
| | | | | GGCCTGACGGCAACACCGACTACAACAGCACCCTGAAGTCCCGGCTGAACATCTTCAAGGACAAC |
| | | | | TCCAAGAACCAGGTGTTCCTGAAGATGTCCTCTTTCCAGACCGACGACACCGCCCGGTACTTTTG |
| | | | | CGCCAGGGACTCCTACGGCAACTTCAAGCGGGGCTGGTTCGATTTTTGGGGCCAGGGCACCACAC |
| | | | | TGACCGTGTCCTCC |
| 469. | PSMA-9 | artificial | aa | NIVMTQSQKFMSTSPGDRVRVTCKASQNVGSDVAWYQAKPGQSPRILIYSTSYRYSGVPDRFTAY |
| | LH x I2C HL | | | GSGTDFTLTITNVQSEDLTEYFCQQYNSYPLTFGAGTKLELKGGGGSGGGGSGGGGSQVQLKESG |
| | | | | PGLVASSQSLSITCTVSGFSLTAYGINWVRQPPGKGLEWLGVIWPDGNTDYNSTLKSRLNIFKDN |
| | | | | SKNQVFLKMSSFQTDDTARYFCARDSYGNFKRGWFDFWGQGTTLTVSSGGGGSEVQLVESGGGLV |
| | | | | QPGGSLKLSCAASGFTFNKYAMNWVRQAPGKGLEWVARIRSKYNNYATYYADSVKDRFTISRDDS |
| | | | | KNTAYLQMNNLKTEDTAVYYCVRHGNFGNSYISYWAYWGQGTLVTVSSGGGGSGGGGSGGGGSQT |
| | | | | VVTQEPSLTVSPGGTVTLTCGSSTGAVTSGNYPNWVQQKPGQAPRGLIGGTKFLAPGTPARFSGS |
| | | | | LLGGKAALTLSGVQPEDEAEYYCVLWYSNRWVFGGGTKLTVL |
| 470. | PSMA-9 | artificial | nt | AACATCGTGATGACCCAGTCCCAGAAATTCATGTCCACCTCTCCCGGCGATAGAGTGCGCGTGAC |
| | LH x I2C HL | | | CTGCAAGGCCTCCCAGAACGTGGGCTCCGACGTGGCCTGGTATCAGGCCAAGCCTGGCCAGTCCC |
| | | | | CTCGGATCCTGATCTACTCCACCTCCTACCGGTACTCCGGCGTGCCTGACAGATTCACCGCCTAC |
| | | | | GGCTCCGGCACCGACTTCACCCTGACCATTACAAACGTGCAGTCCGAGGACCTGACCGAGTACTT |
| | | | | CTGCCAGCAGTACAACTCCTACCCTCTGACCTTCGGCGCTGGCACCAAGCTGGAACTGAAGGGCG |
| | | | | GAGGGGGCTCTGGCGGCGGAGGAAGTGGAGGGGGCGGATCTCAGGTGCAGCTGAAAGAGTCCGGC |
| | | | | CCTGGCCTGGTGGCCTCCTCCCAGTCCCTGTCCATCACCTGCACCGTGTCAGGCTTCTCCCTGAC |
| | | | | CGCTTACGGCATCAACTGGGTGCGCCAGCCTCCTGGCAAGGGCCTGGAATGGCTGGGCGTGATCT |
| | | | | GGCCTGACGGCAACACCGACTACAACAGCACCCTGAAGTCCCGGCTGAACATCTTCAAGGACAAC |
| | | | | TCCAAGAACCAGGTGTTCCTGAAGATGTCCTCTTTCCAGACCGACGACACCGCCCGGTACTTTTG |
| | | | | CGCCAGGGACTCCTACGGCAACTTCAAGCGGGGCTGGTTCGATTTTTGGGGCCAGGGCACCACAC |
| | | | | TGACCGTGTCCTCCGGAGGTGGTGGATCCGAGGTGCAGCTGGTCGAGTCTGGAGGAGGATTGGTG |
| | | | | CAGCCTGGAGGGTCATTGAAACTCTCATGTGCAGCCTCTGGATTCACCTTCAATAAGTACGCCAT |
| | | | | GAACTGGGTCCGCCAGGCTCCAGGAAAGGGTTTGGAATGGGTTGCTCGCATAAGAAGTAAATATA |
| | | | | ATAATTATGCAACATATTATGCCGATTCAGTGAAAGACAGGTTCACCATCTCCAGAGATGATTCA |
| | | | | AAAAACACTGCCTATCTACAAATGAACAACTTGAAAACTGAGGACACTGCCGTGTACTACTGTGT |
| | | | | GAGACATGGGAACTTCGGTAATAGCTACATATCCTACTGGGCTTACTGGGGCCAAGGGACTCTGG |
| | | | | TCACCGTCTCCTCAGGTGGTGGTGGTTCTGGCGGCGGCGGCTCCGGTGGTGGTGGTTCTCAGACT |
| | | | | GTTGTGACTCAGGAACCTTCACTCACCGTATCACCTGGTGGAACAGTCACACTCACTTGTGGCTC |
| | | | | CTCGACTGGGGCTGTTACATCTGGCAACTACCCAAACTGGGTCCAACAAAAACCAGGTCAGGCAC |
| | | | | CCCGTGGTCTAATAGGTGGGACTAAGTTCCTCGCCCCCGGTACTCCTGCCAGATTCTCAGGCTCC |
| | | | | CTGCTTGGAGGCAAGGCTGCCCTCACCCTCTCAGGGGTACAGCCAGAGGATGAGGCAGAATATTA |
| | | | | CTGTGTTCTATGGTACAGCAACCGCTGGGTGTTCGGTGGAGGAACCAAACTGACTGTCCTA |
| 471. | PSMA-10 VL | artificial | aa | NIVMTQFPKSMSISVGERVTLTCKASENVGTYVSWYQQKPEQSPKMLIYGASNRFTGVPDRFTGS |
| | | | | GSATDFILTISSVQTEDLVDYYCGQSYTFPYTFGGGTKLEMK |
| 472. | PSMA-10 VL | artificial | nt | AACATCGTGATGACCCAGTTCCCTAAGTCCATGTCCATCTCCGTGGGCGAGAGAGTGACCCTGAC |
| | | | | CTGCAAGGCCTCCGAGAACGTGGGCACCTACGTGTCCTGGTATCAGCAGAAGCCTGAGCAGTCCC |
| | | | | CTAAGATGCTGATCTACGGCGCCTCCAACAGGTTCACCGGCGTGCCTGACAGATTCACCGGCTCC |
| | | | | GGCTCCGCCACCGACTTCATCCTGACCATCTCCAGCGTGCAGACCGAGGACCTGGTGGACTACTA |
| | | | | CTGCGGCCAGTCCTACACCTTCCCTTACACCTTCGGCGGAGGGACCAAGCTGGAAATGAAG |
| 473. | PSMA-10 LCDR1 | artificial | aa | KASENVGTYVS |
| 474. | PSMA-10 LCDR2 | artificial | aa | GASNRFT |
| 475. | PSMA-10 LCDR3 | artificial | aa | GQSYTFPYT |
| 476. | PSMA-10 VH | artificial | aa | EVKLEESGGGLVQPGGSMKLSCVASGFTFSNYWMNWVRQSPEKGLEWVAEIRSQSNNFATHYAES |
| | | | | VKGRVIISRDDSKSSVYLQMNNLRAEDTGIYYCTRRWNNFWGQGTTLTVSS |
| 477. | PSMA-10 VH | artificial | nt | GAAGTGAAGCTGGAAGAGTCCGGCGGAGGACTGGTGCAGCCTGGCGGCTCCATGAAGCTGTCCTG |
| | | | | CGTGGCTTCCGGCTTCACCTTCTCCAACTACTGGATGAACTGGGTGCGCCAGTCCCCTGAGAAGG |
| | | | | GCCTGGAATGGGTGGCCGAGATCCGGTCCCAGTCCAACAACTTCGCCACCCACTACGCCGAGTCC |
| | | | | GTGAAGGGCAGAGTGATCATCTCCCGGGACGACTCCAAGTCCTCCGTGTACCTGCAGATGAACAA |
| | | | | CCTGCGGGCCGAGGACACCGGCATCTACTACTGCACCCGGCGGTGGAACAACTTTTGGGGCCAGG |
| | | | | GCACCACACTGACCGTGTCCTCC |
| 478. | PSMA-10 HCDR1 | artificial | aa | NYWMN |
| 479. | PSMA-10 HCDR2 | artificial | aa | EIRSQSNNFATHYAESVKG |
| 480. | PSMA-10 HCDR3 | artificial | aa | RWNNF |
| 481. | PSMA-10 LH | artificial | aa | NIVMTQFPKSMSISVGERVTLTCKASENVGTYVSWYQQKPEQSPKMLIYGASNRFTGVPDRFTGS |
| | | | | GSATDFILTISSVQTEDLVDYYCGQSYTFPYTFGGGTKLEMKGGGGSGGGGSGGGGSEVKLEESG |
| | | | | GGLVQPGGSMKLSCVASGFTFSNYWMNWVRQSPEKGLEWVAEIRSQSNNFATHYAESVKGRVIIS |
| | | | | RDDSKSSVYLQMNNLRAEDTGIYYCTRRWNNFWGQGTTLTVSS |
| 482. | PSMA-10 LH | artificial | nt | AACATCGTGATGACCCAGTTCCCTAAGTCCATGTCCATCTCCGTGGGCGAGAGAGTGACCCTGAC |
| | | | | CTGCAAGGCCTCCGAGAACGTGGGCACCTACGTGTCCTGGTATCAGCAGAAGCCTGAGCAGTCCC |
| | | | | CTAAGATGCTGATCTACGGCGCCTCCAACAGGTTCACCGGCGTGCCTGACAGATTCACCGGCTCC |
| | | | | GGCTCCGCCACCGACTTCATCCTGACCATCTCCAGCGTGCAGACCGAGGACCTGGTGGACTACTA |
| | | | | CTGCGGCCAGTCCTACACCTTCCCTTACACCTTCGGCGGAGGGACCAAGCTGGAAATGAAGGGCG |
| | | | | GAGGGGGATCTGGCGGCGGAGGAAGTGGAGGGGGCGGATCCGAAGTGAAGCTGGAAGAGTCCGGC |
| | | | | GGAGGACTGGTGCAGCCTGGCGGCTCCATGAAGCTGTCCTGCGTGGCTTCCGGCTTCACCTTCTC |
| | | | | CAACTACTGGATGAACTGGGTGCGCCAGTCCCCTGAGAAGGGCCTGGAATGGGTGGCCGAGATCC |
| | | | | GGTCCCAGTCCAACAACTTCGCCACCCACTACGCCGAGTCCGTGAAGGGCAGAGTGATCATCTCC |
| | | | | CGGGACGACTCCAAGTCCTCCGTGTACCTGCAGATGAACAACCTGCGGGCCGAGGACACCGGCAT |
| | | | | CTACTACTGCACCCGGCGGTGGAACAACTTTTGGGGCCAGGGCACCACACTGACCGTGTCCTCC |
| 483. | PSMA-10 | artificial | aa | NIVMTQFPKSMSISVGERVTLTCKASENVGTYVSWYQQKPEQSPKMLIYGASNRFTGVPDRFTGS |
| | LH x I2C HL | | | GSATDFILTISSVQTEDLVDYYCGQSYTFPYTFGGGTKLEMKGGGGSGGGGSGGGGSEVKLEESG |
| | | | | GGLVQPGGSMKLSCVASGFTFSNYWMNWVRQSPEKGLEWVAEIRSQSNNFATHYAESVKGRVIIS |
| | | | | RDDSKSSVYLQMNNLRAEDTGIYYCTRRWNNFWGQGTTLTVSSGGGGSEVQLVESGGGLVQPGGS |
| | | | | LKLSCAASGFTFNKYAMNWVRQAPGKGLEWVARIRSKYNNYATYYADSVKDRFTISRDDSKNTAY |
| | | | | LQMNNLKTEDTAVYYCVRHGNFGNSYISYWAYWGQGTLVTVSSGGGGSGGGGSGGGGSQTVVTQE |
| | | | | PSLTVSPGGTVTLTCGSSTGAVTSGNYPNWVQQKPGQAPRGLIGGTKFLAPGTPARFSGSLLGGK |
| | | | | AALTLSGVQPEDEAEYYCVLWYSNRWVFGGGTKLTVL |
| 484. | PSMA-10 | artificial | nt | AACATCGTGATGACCCAGTTCCCTAAGTCCATGTCCATCTCCGTGGGCGAGAGAGTGACCCTGAC |
| | LH x I2C HL | | | CTGCAAGGCCTCCGAGAACGTGGGCACCTACGTGTCCTGGTATCAGCAGAAGCCTGAGCAGTCCC |
| | | | | CTAAGATGCTGATCTACGGCGCCTCCAACAGGTTCACCGGCGTGCCTGACAGATTCACCGGCTCC |
| | | | | GGCTCCGCCACCGACTTCATCCTGACCATCTCCAGCGTGCAGACCGAGGACCTGGTGGACTACTA |
| | | | | CTGCGGCCAGTCCTACACCTTCCCTTACACCTTCGGCGGAGGGACCAAGCTGGAAATGAAGGGCG |
| | | | | GAGGGGGATCTGGCGGCGGAGGAAGTGGAGGGGGCGGATCCGAAGTGAAGCTGGAAGAGTCCGGC |
| | | | | GGAGGACTGGTGCAGCCTGGCGGCTCCATGAAGCTGTCCTGCGTGGCTTCCGGCTTCACCTTCTC |
| | | | | CAACTACTGGATGAACTGGGTGCGCCAGTCCCCTGAGAAGGGCCTGGAATGGGTGGCCGAGATCC |
| | | | | GGTCCCAGTCCAACAACTTCGCCACCCACTACGCCGAGTCCGTGAAGGGCAGAGTGATCATCTCC |
| | | | | CGGGACGACTCCAAGTCCTCCGTGTACCTGCAGATGAACAACCTGCGGGCCGAGGACACCGGCAT |
| | | | | CTACTACTGCACCCGGCGGTGGAACAACTTTTGGGGCCAGGGCACCACACTGACCGTGTCCTCCG |
| | | | | GAGGTGGTGGATCCGAGGTGCAGCTGGTCGAGTCTGGAGGAGGATTGGTGCAGCCTGGAGGGTCA |
| | | | | TTGAAACTCTCATGTGCAGCCTCTGGATTCACCTTCAATAAGTACGCCATGAACTGGGTCCGCCA |
| | | | | GGCTCCAGGAAAGGGTTTGGAATGGGTTGCTCGCATAAGAAGTAAATATAATAATTATGCAACAT |
| | | | | ATTATGCCGATTCAGTGAAAGACAGGTTCACCATCTCCAGAGATGATTCAAAAAACACTGCCTAT |
| | | | | CTACAAATGAACAACTTGAAAACTGAGGACACTGCCGTGTACTACTGTGTGAGACATGGGAACTT |
| | | | | CGGTAATAGCTACATATCCTACTGGGCTTACTGGGGCCAAGGGACTCTGGTCACCGTCTCCTCAG |
| | | | | GTGGTGGTGGTTCTGGCGGCGGCGGCTCCGGTGGTGGTGGTTCTCAGACTGTTGTGACTCAGGAA |
| | | | | CCTTCACTCACCGTATCACCTGGTGGAACAGTCACACTCACTTGTGGCTCCTCGACTGGGGCTGT |
| | | | | TACATCTGGCAACTACCCAAACTGGGTCCAACAAAAACCAGGTCAGGCACCCCGTGGTCTAATAG |
| | | | | GTGGGACTAAGTTCCTCGCCCCCGGTACTCCTGCCAGATTCTCAGGCTCCCTGCTTGGAGGCAAG |
| | | | | GCTGCCCTCACCCTCTCAGGGGTACAGCCAGAGGATGAGGCAGAATATTACTGTGTTCTATGGTA |
| | | | | CAGCAACCGCTGGGTGTTCGGTGGAGGAACCAAACTGACTGTCCTA |
| 485. | PSMA-A VL | artificial | aa | DIQMTQSPSSLSASVGDRVTITCRASQGISNYLAWYQQKTGKVPKFLIYEASTLQSGVPSRFSGG |
| | | | | GSGTDFTLTISSLQPEDVATYYCQNYNSAPFTFGPGTKVDIK |
| 486. | PSMA-A VL | artificial | nt | GACATCCAGATGACCCAGTCCCCCTCCTCCCTGTCTGCCTCCGTGGGCGACAGAGTGACCATCAC |
| | | | | CTGCCGGGCCTCCCAGGGCATCTCCAACTACCTGGCCTGGTATCAGCAGAAAACCGGCAAGGTGC |
| | | | | CCAAGTTCCTGATCTACGAGGCCTCCACCCTGCAGTCCGGCGTGCCTTCCAGATTCTCTGGCGGC |
| | | | | GGATCCGGCACCGACTTCACCCTGACCATCTCCAGCCTGCAGCCTGAGGACGTGGCCACCTACTA |
| | | | | CTGCCAGAACTACAACTCCGCCCCTTTCACCTTCGGCCCTGGCACCAAGGTGGACATCAAG |
| 487. | PSMA-A LCDR1 | artificial | aa | RASQGISNYLA |
| 488. | PSMA-A LCDR2 | artificial | aa | EASTLQS |
| 489. | PSMA-A LCDR3 | artificial | aa | QNYNSAPFT |
| 490. | PSMA-A VH | artificial | aa | QVQLVESGGGVVQPGRSLRLSCAASGFAFSRYGMHWVRQAPGKGLEWVAVIWYDGSNKYYADSVK |
| | | | | GRFTISRDNSKNTQYLQMNSLRAEDTAVYYCARGGDFLYYYYYGMDVWGQGTTVTVSS |
| 491. | PSMA-A VH | artificial | nt | CAGGTGCAGCTGGTCGAGTCTGGCGGAGGGGTGGTCCAGCCTGGCCGGTCCCTGAGACTGTCTTG |
| | | | | CGCCGCCTCCGGCTTCGCCTTCTCCAGATACGGCATGCACTGGGTGCGCCAGGCTCCAGGCAAGG |
| | | | | GACTGGAATGGGTGGCCGTGATTTGGTACGACGGCTCCAACAAGTACTACGCCGACTCCGTGAAG |
| | | | | GGCCGGTTCACCATCTCCCGGGACAACTCCAAGAACACCCAGTACCTGCAGATGAACTCCCTGAG |
| | | | | GGCAGAGGACACCGCCGTGTACTACTGCGCCAGAGGCGGCGACTTCCTGTACTACTACTATTACG |
| | | | | GCATGGACGTGTGGGGCCAGGGCACCACCGTGACAGTGTCTTCC |
| 492. | PSMA-A HCDR1 | artificial | aa | RYGMH |
| 493. | PSMA-A HCDR2 | artificial | aa | VIWYDGSNKYYADSVKG |
| 494. | PSMA-A HCDR3 | artificial | aa | GGDFLYYYYYGMDV |
| 495. | PSMA-A LH | artificial | aa | DIQMTQSPSSLSASVGDRVTITCRASQGISNYLAWYQQKTGKVPKFLIYEASTLQSGVPSRFSGG |
| | | | | GSGTDFTLTISSLQPEDVATYYCQNYNSAPFTFGPGTKVDIKGGGGSGGGGSGGGGSQVQLVESG |
| | | | | GGVVQPGRSLRLSCAASGFAFSRYGMHWVRQAPGKGLEWVAVIWYDGSNKYYADSVKGRFTISRD |
| | | | | NSKNTQYLQMNSLRAEDTAVYYCARGGDFLYYYYYGMDVWGQGTTVTVSS |
| 496. | PSMA-A LH | artificial | nt | GACATCCAGATGACCCAGTCCCCCTCCTCCCTGTCTGCCTCCGTGGGCGACAGAGTGACCATCAC |
| | | | | CTGCCGGGCCTCCCAGGGCATCTCCAACTACCTGGCCTGGTATCAGCAGAAAACCGGCAAGGTGC |
| | | | | CCAAGTTCCTGATCTACGAGGCCTCCACCCTGCAGTCCGGCGTGCCTTCCAGATTCTCTGGCGGC |
| | | | | GGATCCGGCACCGACTTCACCCTGACCATCTCCAGCCTGCAGCCTGAGGACGTGGCCACCTACTA |
| | | | | CTGCCAGAACTACAACTCCGCCCCTTTCACCTTCGGCCCTGGCACCAAGGTGGACATCAAGGGCG |
| | | | | GAGGGGGCAGTGGCGGCGGAGGAAGTGGAGGGGGCGGATCTCAGGTGCAGCTGGTCGAGTCTGGC |
| | | | | GGAGGGGTGGTCCAGCCTGGCCGGTCCCTGAGACTGTCTTGCGCCGCCTCCGGCTTCGCCTTCTC |
| | | | | CAGATACGGCATGCACTGGGTGCGCCAGGCTCCAGGCAAGGGACTGGAATGGGTGGCCGTGATTT |
| | | | | GGTACGACGGCTCCAACAAGTACTACGCCGACTCCGTGAAGGGCCGGTTCACCATCTCCCGGGAC |
| | | | | AACTCCAAGAACACCCAGTACCTGCAGATGAACTCCCTGAGGGCAGAGGACACCGCCGTGTACTA |
| | | | | CTGCGCCAGAGGCGGCGACTTCCTGTACTACTACTATTACGGCATGGACGTGTGGGGCCAGGGCA |
| | | | | CCACCGTGACAGTGTCTTCC |
| 497. | PSMA-A | artificial | aa | DIQMTQSPSSLSASVGDRVTITCRASQGISNYLAWYQQKTGKVPKFLIYEASTLQSGVPSRFSGG |
| | LH x I2C HL | | | GSGTDFTLTISSLQPEDVATYYCQNYNSAPFTFGPGTKVDIKGGGGSGGGGSGGGGSQVQLVESG |
| | | | | GGVVQPGRSLRLSCAASGFAFSRYGMHWVRQAPGKGLEWVAVIWYDGSNKYYADSVKGRFTISRD |
| | | | | NSKNTQYLQMNSLRAEDTAVYYCARGGDFLYYYYYGMDVWGQGTTVTVSSGGGGSEVQLVESGGG |
| | | | | LVQPGGSLKLSCAASGFTFNKYAMNWVRQAPGKGLEWVARIRSKYNNYATYYADSVKDRFTISRD |
| | | | | DSKNTAYLQMNNLKTEDTAVYYCVRHGNFGNSYISYWAYWGQGTLVTVSSGGGGSGGGGSGGGGS |
| | | | | QTVVTQEPSLTVSPGGTVTLTCGSSTGAVTSGNYPNWVQQKPGQAPRGLIGGTKFLAPGTPARFS |
| | | | | GSLLGGKAALTLSGVQPEDEAEYYCVLWYSNRWVFGGGTKLTVL |
| 498. | PSMA-A | artificial | nt | GACATCCAGATGACCCAGTCCCCCTCCTCCCTGTCTGCCTCCGTGGGCGACAGAGTGACCATCAC |
| | LH x I2C HL | | | CTGCCGGGCCTCCCAGGGCATCTCCAACTACCTGGCCTGGTATCAGCAGAAAACCGGCAAGGTGC |
| | | | | CCAAGTTCCTGATCTACGAGGCCTCCACCCTGCAGTCCGGCGTGCCTTCCAGATTCTCTGGCGGC |
| | | | | GGATCCGGCACCGACTTCACCCTGACCATCTCCAGCCTGCAGCCTGAGGACGTGGCCACCTACTA |
| | | | | CTGCCAGAACTACAACTCCGCCCCTTTCACCTTCGGCCCTGGCACCAAGGTGGACATCAAGGGCG |
| | | | | GAGGGGGCAGTGGCGGCGGAGGAAGTGGAGGGGGCGGATCTCAGGTGCAGCTGGTCGAGTCTGGC |
| | | | | GGAGGGGTGGTCCAGCCTGGCCGGTCCCTGAGACTGTCTTGCGCCGCCTCCGGCTTCGCCTTCTC |
| | | | | CAGATACGGCATGCACTGGGTGCGCCAGGCTCCAGGCAAGGGACTGGAATGGGTGGCCGTGATTT |
| | | | | GGTACGACGGCTCCAACAAGTACTACGCCGACTCCGTGAAGGGCCGGTTCACCATCTCCCGGGAC |
| | | | | AACTCCAAGAACACCCAGTACCTGCAGATGAACTCCCTGAGGGCAGAGGACACCGCCGTGTACTA |
| | | | | CTGCGCCAGAGGCGGCGACTTCCTGTACTACTACTATTACGGCATGGACGTGTGGGGCCAGGGCA |
| | | | | CCACCGTGACAGTGTCTTCCGGAGGTGGTGGATCCGAGGTGCAGCTGGTCGAGTCTGGAGGAGGA |
| | | | | TTGGTGCAGCCTGGAGGGTCATTGAAACTCTCATGTGCAGCCTCTGGATTCACCTTCAATAAGTA |
| | | | | CGCCATGAACTGGGTCCGCCAGGCTCCAGGAAAGGGTTTGGAATGGGTTGCTCGCATAAGAAGTA |
| | | | | AATATAATAATTATGCAACATATTATGCCGATTCAGTGAAAGACAGGTTCACCATCTCCAGAGAT |
| | | | | GATTCAAAAAACACTGCCTATCTACAAATGAACAACTTGAAAACTGAGGACACTGCCGTGTACTA |
| | | | | CTGTGTGAGACATGGGAACTTCGGTAATAGCTACATATCCTACTGGGCTTACTGGGGCCAAGGGA |
| | | | | CTCTGGTCACCGTCTCCTCAGGTGGTGGTGGTTCTGGCGGCGGCGGCTCCGGTGGTGGTGGTTCT |
| | | | | CAGACTGTTGTGACTCAGGAACCTTCACTCACCGTATCACCTGGTGGAACAGTCACACTCACTTG |
| | | | | TGGCTCCTCGACTGGGGCTGTTACATCTGGCAACTACCCAAACTGGGTCCAACAAAAACCAGGTC |
| | | | | AGGCACCCCGTGGTCTAATAGGTGGGACTAAGTTCCTCGCCCCCGGTACTCCTGCCAGATTCTCA |
| | | | | GGCTCCCTGCTTGGAGGCAAGGCTGCCCTCACCCTCTCAGGGGTACAGCCAGAGGATGAGGCAGA |
| | | | | ATATTACTGTGTTCTATGGTACAGCAACCGCTGGGTGTTCGGTGGAGGAACCAAACTGACTGTCC |
| | | | | TA |
| 499. | PSMA-B VL | artificial | aa | DIQMTQSPSSLSASVGDRVTITCRASQGITNYLAWFQQKPGKAPKSLIYAASSLQSGVPSKFSGS |
| | | | | GSGTDFSLTISSLQPEDFATYYCQQYNSYPITFGQGTRLEIK |
| 500. | PSMA-B VL | artificial | nt | GACATCCAGATGACCCAGTCACCCTCCTCCCTGTCTGCCTCCGTGGGCGACAGAGTGACCATCAC |
| | | | | CTGCCGGGCCTCACAGGGCATCACCAACTACCTGGCCTGGTTCCAGCAGAAGCCTGGCAAGGCCC |
| | | | | CTAAGTCCCTGATCTACGCCGCCTCCTCTCTGCAGTCCGGCGTGCCTTCCAAGTTCTCCGGCTCC |
| | | | | GGCTCTGGCACCGACTTCTCCCTGACCATCTCCTCCCTGCAGCCTGAGGACTTCGCCACCTACTA |
| | | | | CTGCCAGCAGTACAACTCCTACCCTATCACCTTCGGCCAGGGCACCCGGCTGGAAATCAAG |
| 501. | PSMA-B LCDR1 | artificial | aa | RASQGITNYLA |
| 502. | PSMA-B LCDR2 | artificial | aa | AASSLQS |
| 503. | PSMA-B LCDR3 | artificial | aa | QQYNSYPIT |
| 504. | PSMA-B VH | artificial | aa | QVQLVESGGGVVQPGRSLRLSCAASGFTFSNYVMHWVRQAPGKGLEWVAIIWYDGSNKYYADSVK |
| | | | | GRFTISRDNSKNTLYLQMNSLRAEDTAVYYCAGGYNWNYEYHYYGMDVWGQGTTVTVSS |
| 505. | PSMA-B VH | artificial | nt | CAGGTGCAGCTGGTCGAGTCTGGCGGAGGGGTGGTGCAGCCTGGCCGGTCCCTGAGACTGTCTTG |
| | | | | CGCTGCCTCCGGCTTCACCTTCTCCAACTACGTGATGCACTGGGTGCGCCAGGCTCCAGGCAAGG |
| | | | | GACTGGAATGGGTGGCCATCATTTGGTACGACGGCTCCAACAAGTACTACGCCGACTCCGTGAAG |
| | | | | GGCCGGTTCACCATCTCCCGGGACAACTCCAAGAACACCCTGTACCTGCAGATGAACTCCCTGAG |
| | | | | GGCCGAGGACACCGCCGTGTACTACTGCGCTGGCGGCTACAACTGGAACTACGAGTACCACTACT |
| | | | | ACGGCATGGACGTGTGGGGCCAGGGAACCACCGTGACCGTGTCTTCC |
| 506. | PSMA-B HCDR1 | artificial | aa | NYVMH |
| 507. | PSMA-B HCDR2 | artificial | aa | IIWYDGSNKYYADSVKG |
| 508. | PSMA-B HCDR3 | artificial | aa | GYNWNYEYHYYGMDV |
| 509. | PSMA-B LH | artificial | aa | DIQMTQSPSSLSASVGDRVTITCRASQGITNYLAWFQQKPGKAPKSLIYAASSLQSGVPSKFSGS |
| | | | | GSGTDFSLTISSLQPEDFATYYCQQYNSYPITFGQGTRLEIKGGGGSGGGGSGGGGSQVQLVESG |
| | | | | GGVVQPGRSLRLSCAASGFTFSNYVMHWVRQAPGKGLEWVAIIWYDGSNKYYADSVKGRFTISRD |
| | | | | NSKNTLYLQMNSLRAEDTAVYYCAGGYNWNYEYHYYGMDVWGQGTTVTVSS |
| 510. | PSMA-B LH | artificial | nt | GACATCCAGATGACCCAGTCACCCTCCTCCCTGTCTGCCTCCGTGGGCGACAGAGTGACCATCAC |
| | | | | CTGCCGGGCCTCACAGGGCATCACCAACTACCTGGCCTGGTTCCAGCAGAAGCCTGGCAAGGCCC |
| | | | | CTAAGTCCCTGATCTACGCCGCCTCCTCTCTGCAGTCCGGCGTGCCTTCCAAGTTCTCCGGCTCC |
| | | | | GGCTCTGGCACCGACTTCTCCCTGACCATCTCCTCCCTGCAGCCTGAGGACTTCGCCACCTACTA |
| | | | | CTGCCAGCAGTACAACTCCTACCCTATCACCTTCGGCCAGGGCACCCGGCTGGAAATCAAGGGCG |
| | | | | GAGGGGGATCTGGCGGCGGAGGAAGTGGAGGGGGCGGATCTCAGGTGCAGCTGGTCGAGTCTGGC |
| | | | | GGAGGGGTGGTGCAGCCTGGCCGGTCCCTGAGACTGTCTTGCGCTGCCTCCGGCTTCACCTTCTC |
| | | | | CAACTACGTGATGCACTGGGTGCGCCAGGCTCCAGGCAAGGGACTGGAATGGGTGGCCATCATTT |
| | | | | GGTACGACGGCTCCAACAAGTACTACGCCGACTCCGTGAAGGGCCGGTTCACCATCTCCCGGGAC |
| | | | | AACTCCAAGAACACCCTGTACCTGCAGATGAACTCCCTGAGGGCCGAGGACACCGCCGTGTACTA |
| | | | | CTGCGCTGGCGGCTACAACTGGAACTACGAGTACCACTACTACGGCATGGACGTGTGGGGCCAGG |
| | | | | GAACCACCGTGACCGTGTCTTCC |
| 511. | PSMA-B | artificial | aa | DIQMTQSPSSLSASVGDRVTITCRASQGITNYLAWFQQKPGKAPKSLIYAASSLQSGVPSKFSGS |
| | LH x I2C HL | | | GSGTDFSLTISSLQPEDFATYYCQQYNSYPITFGQGTRLEIKGGGGSGGGGSGGGGSQVQLVESG |
| | | | | GGVVQPGRSLRLSCAASGFTFSNYVMHWVRQAPGKGLEWVAIIWYDGSNKYYADSVKGRFTISRD |
| | | | | NSKNTLYLQMNSLRAEDTAVYYCAGGYNWNYEYHYYGMDVWGQGTTVTVSSGGGGSEVQLVESGG |
| | | | | GLVQPGGSLKLSCAASGFTFNKYAMNWVRQAPGKGLEWVARIRSKYNNYATYYADSVKDRFTISR |
| | | | | DDSKNTAYLQMNNLKTEDTAVYYCVRHGNFGNSYISYWAYWGQGTLVTVSSGGGGSGGGGSGGGG |
| | | | | SQTVVTQEPSLTVSPGGTVTLTCGSSTGAVTSGNYPNWVQQKPGQAPRGLIGGTKFLAPGTPARF |
| | | | | SGSLLGGKAALTLSGVQPEDEAEYYCVLWYSNRWVFGGGTKLTVL |
| 512. | PSMA-B | artificial | nt | GACATCCAGATGACCCAGTCACCCTCCTCCCTGTCTGCCTCCGTGGGCGACAGAGTGACCATCAC |
| | LH x I2C HL | | | CTGCCGGGCCTCACAGGGCATCACCAACTACCTGGCCTGGTTCCAGCAGAAGCCTGGCAAGGCCC |
| | | | | CTAAGTCCCTGATCTACGCCGCCTCCTCTCTGCAGTCCGGCGTGCCTTCCAAGTTCTCCGGCTCC |
| | | | | GGCTCTGGCACCGACTTCTCCCTGACCATCTCCTCCCTGCAGCCTGAGGACTTCGCCACCTACTA |
| | | | | CTGCCAGCAGTACAACTCCTACCCTATCACCTTCGGCCAGGGCACCCGGCTGGAAATCAAGGGCG |
| | | | | GAGGGGGATCTGGCGGCGGAGGAAGTGGAGGGGGCGGATCTCAGGTGCAGCTGGTCGAGTCTGGC |
| | | | | GGAGGGGTGGTGCAGCCTGGCCGGTCCCTGAGACTGTCTTGCGCTGCCTCCGGCTTCACCTTCTC |
| | | | | CAACTACGTGATGCACTGGGTGCGCCAGGCTCCAGGCAAGGGACTGGAATGGGTGGCCATCATTT |
| | | | | GGTACGACGGCTCCAACAAGTACTACGCCGACTCCGTGAAGGGCCGGTTCACCATCTCCCGGGAC |
| | | | | AACTCCAAGAACACCCTGTACCTGCAGATGAACTCCCTGAGGGCCGAGGACACCGCCGTGTACTA |
| | | | | CTGCGCTGGCGGCTACAACTGGAACTACGAGTACCACTACTACGGCATGGACGTGTGGGGCCAGG |
| | | | | GAACCACCGTGACCGTGTCTTCCGGAGGTGGTGGATCCGAGGTGCAGCTGGTCGAGTCTGGAGGA |
| | | | | GGATTGGTGCAGCCTGGAGGGTCATTGAAACTCTCATGTGCAGCCTCTGGATTCACCTTCAATAA |
| | | | | GTACGCCATGAACTGGGTCCGCCAGGCTCCAGGAAAGGGTTTGGAATGGGTTGCTCGCATAAGAA |
| | | | | GTAAATATAATAATTATGCAACATATTATGCCGATTCAGTGAAAGACAGGTTCACCATCTCCAGA |
| | | | | GATGATTCAAAAAACACTGCCTATCTACAAATGAACAACTTGAAAACTGAGGACACTGCCGTGTA |
| | | | | CTACTGTGTGAGACATGGGAACTTCGGTAATAGCTACATATCCTACTGGGCTTACTGGGGCCAAG |
| | | | | GGACTCTGGTCACCGTCTCCTCAGGTGGTGGTGGTTCTGGCGGCGGCGGCTCCGGTGGTGGTGGT |
| | | | | TCTCAGACTGTTGTGACTCAGGAACCTTCACTCACCGTATCACCTGGTGGAACAGTCACACTCAC |
| | | | | TTGTGGCTCCTCGACTGGGGCTGTTACATCTGGCAACTACCCAAACTGGGTCCAACAAAAACCAG |
| | | | | GTCAGGCACCCCGTGGTCTAATAGGTGGGACTAAGTTCCTCGCCCCCGGTACTCCTGCCAGATTC |
| | | | | TCAGGCTCCCTGCTTGGAGGCAAGGCTGCCCTCACCCTCTCAGGGGTACAGCCAGAGGATGAGGC |
| | | | | AGAATATTACTGTGTTCTATGGTACAGCAACCGCTGGGTGTTCGGTGGAGGAACCAAACTGACTG |
| | | | | TCCTA |
| 513. | PSMA-C VL | artificial | aa | DIQMTQSPSSLSASVGDRVTITCRASQGISHYLAWFQQKPGKAPKSLIYAASSLQSGVPSKFSGS |
| | | | | GSGTDFTLTISSLQPEDFATYYCQQYNSFPLTFGGGTKVEIK |
| 514. | PSMA-C VL | artificial | nt | GACATCCAGATGACCCAGTCTCCCTCCTCCCTGTCTGCCTCCGTGGGCGACAGAGTGACCATCAC |
| | | | | CTGCCGGGCCTCCCAGGGCATCTCTCACTACCTGGCCTGGTTCCAGCAGAAGCCTGGCAAGGCCC |
| | | | | CTAAGTCCCTGATCTACGCCGCCTCCTCTCTGCAGTCCGGCGTGCCTTCCAAGTTCTCCGGCTCC |
| | | | | GGCTCTGGCACCGACTTCACCCTGACCATCTCCAGCCTGCAGCCTGAGGACTTCGCCACCTACTA |
| | | | | CTGCCAGCAGTACAACTCCTTCCCTCTGACCTTCGGCGGAGGGACCAAGGTGGAGATCAAG |
| 515. | PSMA-C LCDR1 | artificial | aa | RASQGISHYLA |
| 516. | PSMA-C LCDR2 | artificial | aa | AASSLQS |
| 517. | PSMA-C LCDR3 | artificial | aa | QQYNSFPLT |
| 518. | PSMA-C VH | artificial | aa | QVQLVESGGGVVQPGRSLRLSCAASGFTFSSYGMHWVRQAPGKGLDWVAIIWHDGSNKYYADSVK |
| | | | | GRFTISRDNSKKTLYLQMNSLRAEDTAVYYCARAWAYDYGDYEYYFGMDVWGQGTTVTVSS |
| 519. | PSMA-C VH | artificial | nt | CAGGTGCAGCTGGTCGAGTCTGGCGGAGGGGTGGTGCAGCCTGGCCGGTCCCTGAGACTGTCTTG |
| | | | | TGCCGCCTCCGGCTTCACCTTCTCCTCTTACGGCATGCACTGGGTGCGCCAGGCTCCAGGCAAGG |
| | | | | GACTGGACTGGGTGGCCATCATCTGGCACGACGGCTCCAACAAGTACTACGCCGACTCCGTGAAG |
| | | | | GGCCGGTTCACCATCTCCCGGGACAACTCCAAGAAAACCCTGTACCTGCAGATGAACTCCCTGAG |
| | | | | GGCCGAGGACACCGCCGTGTACTACTGTGCCAGGGCCTGGGCCTACGACTACGGCGACTACGAGT |
| | | | | ACTACTTCGGCATGGACGTGTGGGGCCAGGGCACCACCGTGACAGTGTCTTCC |
| 520. | PSMA-C HCDR1 | artificial | aa | SYGMH |
| 521. | PSMA-C HCDR2 | artificial | aa | IIWHDGSNKYYADSVKG |
| 522. | PSMA-C HCDR3 | artificial | aa | AWAYDYGDYEYYFGMDV |
| 523. | PSMA-C LH | artificial | aa | DIQMTQSPSSLSASVGDRVTITCRASQGISHYLAWFQQKPGKAPKSLIYAASSLQSGVPSKFSGS |
| | | | | GSGTDFTLTISSLQPEDFATYYCQQYNSFPLTFGGGTKVEIKGGGGSGGGGSGGGGSQVQLVESG |
| | | | | GGVVQPGRSLRLSCAASGFTFSSYGMHWVRQAPGKGLDWVAIIWHDGSNKYYADSVKGRFTISRD |
| | | | | NSKKTLYLQMNSLRAEDTAVYYCARAWAYDYGDYEYYFGMDVWGQGTTVTVSS |
| 524. | PSMA-C LH | artificial | nt | GACATCCAGATGACCCAGTCTCCCTCCTCCCTGTCTGCCTCCGTGGGCGACAGAGTGACCATCAC |
| | | | | CTGCCGGGCCTCCCAGGGCATCTCTCACTACCTGGCCTGGTTCCAGCAGAAGCCTGGCAAGGCCC |
| | | | | CTAAGTCCCTGATCTACGCCGCCTCCTCTCTGCAGTCCGGCGTGCCTTCCAAGTTCTCCGGCTCC |
| | | | | GGCTCTGGCACCGACTTCACCCTGACCATCTCCAGCCTGCAGCCTGAGGACTTCGCCACCTACTA |
| | | | | CTGCCAGCAGTACAACTCCTTCCCTCTGACCTTCGGCGGAGGGACCAAGGTGGAGATCAAGGGCG |
| | | | | GAGGGGGCTCTGGCGGCGGAGGAAGTGGAGGGGGCGGATCTCAGGTGCAGCTGGTCGAGTCTGGC |
| | | | | GGAGGGGTGGTGCAGCCTGGCCGGTCCCTGAGACTGTCTTGTGCCGCCTCCGGCTTCACCTTCTC |
| | | | | CTCTTACGGCATGCACTGGGTGCGCCAGGCTCCAGGCAAGGGACTGGACTGGGTGGCCATCATCT |
| | | | | GGCACGACGGCTCCAACAAGTACTACGCCGACTCCGTGAAGGGCCGGTTCACCATCTCCCGGGAC |
| | | | | AACTCCAAGAAAACCCTGTACCTGCAGATGAACTCCCTGAGGGCCGAGGACACCGCCGTGTACTA |
| | | | | CTGTGCCAGGGCCTGGGCCTACGACTACGGCGACTACGAGTACTACTTCGGCATGGACGTGTGGG |
| | | | | GCCAGGGCACCACCGTGACAGTGTCTTCC |
| 525. | PSMA-C | artificial | aa | DIQMTQSPSSLSASVGDRVTITCRASQGISHYLAWFQQKPGKAPKSLIYAASSLQSGVPSKFSGS |
| | LH x I2C HL | | | GSGTDFTLTISSLQPEDFATYYCQQYNSFPLTFGGGTKVEIKGGGGSGGGGSGGGGSQVQLVESG |
| | | | | GGVVQPGRSLRLSCAASGFTFSSYGMHWVRQAPGKGLDWVAIIWHDGSNKYYADSVKGRFTISRD |
| | | | | NSKKTLYLQMNSLRAEDTAVYYCARAWAYDYGDYEYYFGMDVWGQGTTVTVSSGGGGSEVQLVES |
| | | | | GGGLVQPGGSLKLSCAASGFTFNKYAMNWVRQAPGKGLEWVARIRSKYNNYATYYADSVKDRFTI |
| | | | | SRDDSKNTAYLQMNNLKTEDTAVYYCVRHGNFGNSYISYWAYWGQGTLVTVSSGGGGSGGGGSGG |
| | | | | GGSQTVVTQEPSLTVSPGGTVTLTCGSSTGAVTSGNYPNWVQQKPGQAPRGLIGGTKFLAPGTPA |
| | | | | RFSGSLLGGKAALTLSGVQPEDEAEYYCVLWYSNRWVFGGGTKLTVL |
| 526. | PSMA-C | artificial | nt | GACATCCAGATGACCCAGTCTCCCTCCTCCCTGTCTGCCTCCGTGGGCGACAGAGTGACCATCAC |
| | LH x I2C HL | | | CTGCCGGGCCTCCCAGGGCATCTCTCACTACCTGGCCTGGTTCCAGCAGAAGCCTGGCAAGGCCC |
| | | | | CTAAGTCCCTGATCTACGCCGCCTCCTCTCTGCAGTCCGGCGTGCCTTCCAAGTTCTCCGGCTCC |
| | | | | GGCTCTGGCACCGACTTCACCCTGACCATCTCCAGCCTGCAGCCTGAGGACTTCGCCACCTACTA |
| | | | | CTGCCAGCAGTACAACTCCTTCCCTCTGACCTTCGGCGGAGGGACCAAGGTGGAGATCAAGGGCG |
| | | | | GAGGGGGCTCTGGCGGCGGAGGAAGTGGAGGGGGCGGATCTCAGGTGCAGCTGGTCGAGTCTGGC |
| | | | | GGAGGGGTGGTGCAGCCTGGCCGGTCCCTGAGACTGTCTTGTGCCGCCTCCGGCTTCACCTTCTC |
| | | | | CTCTTACGGCATGCACTGGGTGCGCCAGGCTCCAGGCAAGGGACTGGACTGGGTGGCCATCATCT |
| | | | | GGCACGACGGCTCCAACAAGTACTACGCCGACTCCGTGAAGGGCCGGTTCACCATCTCCCGGGAC |
| | | | | AACTCCAAGAAAACCCTGTACCTGCAGATGAACTCCCTGAGGGCCGAGGACACCGCCGTGTACTA |
| | | | | CTGTGCCAGGGCCTGGGCCTACGACTACGGCGACTACGAGTACTACTTCGGCATGGACGTGTGGG |
| | | | | GCCAGGGCACCACCGTGACAGTGTCTTCCGGAGGTGGTGGATCCGAGGTGCAGCTGGTCGAGTCT |
| | | | | GGAGGAGGATTGGTGCAGCCTGGAGGGTCATTGAAACTCTCATGTGCAGCCTCTGGATTCACCTT |
| | | | | CAATAAGTACGCCATGAACTGGGTCCGCCAGGCTCCAGGAAAGGGTTTGGAATGGGTTGCTCGCA |
| | | | | TAAGAAGTAAATATAATAATTATGCAACATATTATGCCGATTCAGTGAAAGACAGGTTCACCATC |
| | | | | TCCAGAGATGATTCAAAAAACACTGCCTATCTACAAATGAACAACTTGAAAACTGAGGACACTGC |
| | | | | CGTGTACTACTGTGTGAGACATGGGAACTTCGGTAATAGCTACATATCCTACTGGGCTTACTGGG |
| | | | | GCCAAGGGACTCTGGTCACCGTCTCCTCAGGTGGTGGTGGTTCTGGCGGCGGCGGCTCCGGTGGT |
| | | | | GGTGGTTCTCAGACTGTTGTGACTCAGGAACCTTCACTCACCGTATCACCTGGTGGAACAGTCAC |
| | | | | ACTCACTTGTGGCTCCTCGACTGGGGCTGTTACATCTGGCAACTACCCAAACTGGGTCCAACAAA |
| | | | | AACCAGGTCAGGCACCCCGTGGTCTAATAGGTGGGACTAAGTTCCTCGCCCCCGGTACTCCTGCC |
| | | | | AGATTCTCAGGCTCCCTGCTTGGAGGCAAGGCTGCCCTCACCCTCTCAGGGGTACAGCCAGAGGA |
| | | | | TGAGGCAGAATATTACTGTGTTCTATGGTACAGCAACCGCTGGGTGTTCGGTGGAGGAACCAAAC |
| | | | | TGACTGTCCTA |
| 527. | PSMA-D VL | artificial | aa | GIVMTQSPATLSVSPGERATLSCRTSQSIGWNLAWYQQKPGQAPRLLIYGASSRTTGIPARFSGS |
| | | | | GSGTEFTLTISSLQSEDSAVYYCQHYDNWPMCSFGQGTELEIK |
| 528. | PSMA-D VL | artificial | nt | GGCATCGTGATGACCCAGTCCCCCGCCACCCTGTCTGTGTCTCCCGGCGAGAGAGCCACCCTGAG |
| | | | | CTGCCGGACCTCCCAGTCCATCGGCTGGAACCTGGCCTGGTATCAGCAGAAGCCTGGACAGGCCC |
| | | | | CTAGACTGCTGATCTACGGCGCCTCCTCCAGAACCACCGGCATCCCTGCCAGGTTCTCCGGCTCT |
| | | | | GGCTCCGGCACCGAGTTCACCCTGACCATCTCCAGCCTGCAGTCCGAGGACTCCGCCGTGTACTA |
| | | | | CTGCCAGCACTACGACAACTGGCCTATGTGCTCCTTCGGCCAGGGCACCGAGCTGGAAATCAAG |
| 529. | PSMA-D LCDR1 | artificial | aa | RTSQSIGWNLA |
| 530. | PSMA-D LCDR2 | artificial | aa | GASSRTT |
| 531. | PSMA-D LCDR3 | artificial | aa | QHYDNWPMCS |
| 532. | PSMA-D VH | artificial | aa | EVQLVQSGAEVKKPGESLKISCKGSGYSFTSYWIGWVRQMPGKGLEWMGIIYPGDSDTRYSPSFQ |
| | | | | GQVTISADKSISTAYLQWSSLKASDTAMYYCARRMAAAGPFDYWGQGTLVTVSS |
| 533. | PSMA-D VH | artificial | nt | GAAGTGCAGCTGGTGCAGTCTGGCGCCGAAGTGAAGAAGCCCGGCGAGTCCCTGAAGATCTCCTG |
| | | | | CAAGGGCTCCGGCTACTCCTTCACCTCCTACTGGATCGGCTGGGTGCGCCAGATGCCTGGCAAGG |
| | | | | GCCTGGAATGGATGGGCATCATCTACCCTGGCGACTCCGACACCCGGTACTCTCCCAGCTTCCAG |
| | | | | GGCCAGGTGACCATCTCTGCCGACAAGTCCATCTCCACCGCCTACCTGCAGTGGTCCTCCCTGAA |
| | | | | GGCCTCCGACACCGCCATGTACTATTGCGCCAGGCGGATGGCCGCTGCCGGCCCTTTTGATTACT |
| | | | | GGGGCCAGGGAACCCTGGTGACCGTGTCCTCC |
| 534. | PSMA-D HCDR1 | artificial | aa | SYWIG |
| 535. | PSMA-D HCDR2 | artificial | aa | IIYPGDSDTRYSPSFQG |
| 536. | PSMA-D HCDR3 | artificial | aa | RMAAAGPFDY |
| 537. | PSMA-D LH | artificial | aa | GIVMTQSPATLSVSPGERATLSCRTSQSIGWNLAWYQQKPGQAPRLLIYGASSRTTGIPARFSGS |
| | | | | GSGTEFTLTISSLQSEDSAVYYCQHYDNWPMCSFGQGTELEIKGGGGSGGGGSGGGGSEVQLVQS |
| | | | | GAEVKKPGESLKISCKGSGYSFTSYWIGWVRQMPGKGLEWMGIIYPGDSDTRYSPSFQGQVTISA |
| | | | | DKSISTAYLQWSSLKASDTAMYYCARRMAAAGPFDYWGQGTLVTVSS |
| 538. | PSMA-D LH | artificial | nt | GGCATCGTGATGACCCAGTCCCCCGCCACCCTGTCTGTGTCTCCCGGCGAGAGAGCCACCCTGAG |
| | | | | CTGCCGGACCTCCCAGTCCATCGGCTGGAACCTGGCCTGGTATCAGCAGAAGCCTGGACAGGCCC |
| | | | | CTAGACTGCTGATCTACGGCGCCTCCTCCAGAACCACCGGCATCCCTGCCAGGTTCTCCGGCTCT |
| | | | | GGCTCCGGCACCGAGTTCACCCTGACCATCTCCAGCCTGCAGTCCGAGGACTCCGCCGTGTACTA |
| | | | | CTGCCAGCACTACGACAACTGGCCTATGTGCTCCTTCGGCCAGGGCACCGAGCTGGAAATCAAGG |
| | | | | GCGGAGGGGGATCTGGCGGCGGAGGAAGTGGAGGGGGCGGATCCGAAGTGCAGCTGGTGCAGTCT |
| | | | | GGCGCCGAAGTGAAGAAGCCCGGCGAGTCCCTGAAGATCTCCTGCAAGGGCTCCGGCTACTCCTT |
| | | | | CACCTCCTACTGGATCGGCTGGGTGCGCCAGATGCCTGGCAAGGGCCTGGAATGGATGGGCATCA |
| | | | | TCTACCCTGGCGACTCCGACACCCGGTACTCTCCCAGCTTCCAGGGCCAGGTGACCATCTCTGCC |
| | | | | GACAAGTCCATCTCCACCGCCTACCTGCAGTGGTCCTCCCTGAAGGCCTCCGACACCGCCATGTA |
| | | | | CTATTGCGCCAGGCGGATGGCCGCTGCCGGCCCTTTTGATTACTGGGGCCAGGGAACCCTGGTGA |
| | | | | CCGTGTCCTCC |
| 539. | PSMA-D | artificial | aa | GIVMTQSPATLSVSPGERATLSCRTSQSIGWNLAWYQQKPGQAPRLLIYGASSRTTGIPARFSGS |
| | LH x I2C HL | | | GSGTEFTLTISSLQSEDSAVYYCQHYDNWPMCSFGQGTELEIKGGGGSGGGGSGGGGSEVQLVQS |
| | | | | GAEVKKPGESLKISCKGSGYSFTSYWIGWVRQMPGKGLEWMGIIYPGDSDTRYSPSFQGQVTISA |
| | | | | DKSISTAYLQWSSLKASDTAMYYCARRMAAAGPFDYWGQGTLVTVSSGGGGSEVQLVESGGGLVQ |
| | | | | PGGSLKLSCAASGFTFNKYAMNWVRQAPGKGLEWVARIRSKYNNYATYYADSVKDRFTISRDDSK |
| | | | | NTAYLQMNNLKTEDTAVYYCVRHGNFGNSYISYWAYWGQGTLVTVSSGGGGSGGGGSGGGGSQTV |
| | | | | VTQEPSLTVSPGGTVTLTCGSSTGAVTSGNYPNWVQQKPGQAPRGLIGGTKFLAPGTPARFSGSL |
| | | | | LGGKAALTLSGVQPEDEAEYYCVLWYSNRWVFGGGTKLTVL |
| 540. | PSMA-D | artificial | nt | GGCATCGTGATGACCCAGTCCCCCGCCACCCTGTCTGTGTCTCCCGGCGAGAGAGCCACCCTGAG |
| | LH x I2C HL | | | CTGCCGGACCTCCCAGTCCATCGGCTGGAACCTGGCCTGGTATCAGCAGAAGCCTGGACAGGCCC |
| | | | | CTAGACTGCTGATCTACGGCGCCTCCTCCAGAACCACCGGCATCCCTGCCAGGTTCTCCGGCTCT |
| | | | | GGCTCCGGCACCGAGTTCACCCTGACCATCTCCAGCCTGCAGTCCGAGGACTCCGCCGTGTACTA |
| | | | | CTGCCAGCACTACGACAACTGGCCTATGTGCTCCTTCGGCCAGGGCACCGAGCTGGAAATCAAGG |
| | | | | GCGGAGGGGGATCTGGCGGCGGAGGAAGTGGAGGGGGCGGATCCGAAGTGCAGCTGGTGCAGTCT |
| | | | | GGCGCCGAAGTGAAGAAGCCCGGCGAGTCCCTGAAGATCTCCTGCAAGGGCTCCGGCTACTCCTT |
| | | | | CACCTCCTACTGGATCGGCTGGGTGCGCCAGATGCCTGGCAAGGGCCTGGAATGGATGGGCATCA |
| | | | | TCTACCCTGGCGACTCCGACACCCGGTACTCTCCCAGCTTCCAGGGCCAGGTGACCATCTCTGCC |
| | | | | GACAAGTCCATCTCCACCGCCTACCTGCAGTGGTCCTCCCTGAAGGCCTCCGACACCGCCATGTA |
| | | | | CTATTGCGCCAGGCGGATGGCCGCTGCCGGCCCTTTTGATTACTGGGGCCAGGGAACCCTGGTGA |
| | | | | CCGTGTCCTCCGGAGGTGGTGGATCCGAGGTGCAGCTGGTCGAGTCTGGAGGAGGATTGGTGCAG |
| | | | | CCTGGAGGGTCATTGAAACTCTCATGTGCAGCCTCTGGATTCACCTTCAATAAGTACGCCATGAA |
| | | | | CTGGGTCCGCCAGGCTCCAGGAAAGGGTTTGGAATGGGTTGCTCGCATAAGAAGTAAATATAATA |
| | | | | ATTATGCAACATATTATGCCGATTCAGTGAAAGACAGGTTCACCATCTCCAGAGATGATTCAAAA |
| | | | | AACACTGCCTATCTACAAATGAACAACTTGAAAACTGAGGACACTGCCGTGTACTACTGTGTGAG |
| | | | | ACATGGGAACTTCGGTAATAGCTACATATCCTACTGGGCTTACTGGGGCCAAGGGACTCTGGTCA |
| | | | | CCGTCTCCTCAGGTGGTGGTGGTTCTGGCGGCGGCGGCTCCGGTGGTGGTGGTTCTCAGACTGTT |
| | | | | GTGACTCAGGAACCTTCACTCACCGTATCACCTGGTGGAACAGTCACACTCACTTGTGGCTCCTC |
| | | | | GACTGGGGCTGTTACATCTGGCAACTACCCAAACTGGGTCCAACAAAAACCAGGTCAGGCACCCC |
| | | | | GTGGTCTAATAGGTGGGACTAAGTTCCTCGCCCCCGGTACTCCTGCCAGATTCTCAGGCTCCCTG |
| | | | | CTTGGAGGCAAGGCTGCCCTCACCCTCTCAGGGGTACAGCCAGAGGATGAGGCAGAATATTACTG |
| | | | | TGTTCTATGGTACAGCAACCGCTGGGTGTTCGGTGGAGGAACCAAACTGACTGTCCTA |
| 541. | PSMA-E VL | artificial | aa | DIVMTQTPLSLSVTPGQPASISCKSSQSLLHSDGKTFLYWYLQKPGQPPQLLIYEVSNRFSGVPD |
| | | | | RFSGSGSGTDFTLKISRVEAEDVGLYYCMQSIQLPLTFGGGTKVEIK |
| 542. | PSMA-E VL | artificial | nt | GACATCGTGATGACCCAGACCCCTCTGTCCCTGTCTGTGACCCCTGGCCAGCCTGCCTCCATCTC |
| | | | | CTGCAAGTCCTCCCAGTCCCTGCTGCACTCCGACGGCAAGACCTTCCTGTACTGGTATCTGCAGA |
| | | | | AGCCCGGCCAGCCTCCTCAGCTGCTGATCTACGAGGTGTCCAACCGGTTCTCCGGCGTGCCTGAC |
| | | | | AGGTTCTCTGGCTCCGGCTCCGGCACCGACTTCACCCTGAAGATCTCCCGGGTGGAGGCTGAGGA |
| | | | | CGTGGGCCTGTACTACTGCATGCAGTCCATCCAGCTGCCTCTGACCTTCGGCGGAGGGACCAAGG |
| | | | | TGGAGATCAAG |
| 543. | PSMA-E LCDR1 | artificial | aa | KSSQSLLHSDGKTFLY |
| 544. | PSMA-E LCDR2 | artificial | aa | EVSNRFS |
| 545. | PSMA-E LCDR3 | artificial | aa | MQSIQLPLT |
| 546. | PSMA-E VH | artificial | aa | QVQLVESGGGVVQPGRSLRLSCAASGFTFISYGMHWVRQAPGKGLEWVAVISYDGSNKYYADSVK |
| | | | | GRFTISRDNSKNTLYLQMNSLRAEDTAVYYCARVLVGALYYYNYYGMDVWGQGTTVTVSS |
| 547. | PSMA-E VH | artificial | nt | CAGGTGCAGCTGGTCGAGTCTGGGGGAGGGGTCGTGCAGCCTGGCCGGTCCCTGAGACTGTCTTG |
| | | | | CGCCGCCTCCGGCTTCACCTTCATCTCTTACGGCATGCACTGGGTGCGCCAGGCTCCAGGCAAGG |
| | | | | GACTGGAATGGGTGGCCGTGATCTCCTACGACGGCTCCAACAAGTACTACGCCGACTCCGTGAAG |
| | | | | GGCCGGTTCACCATCTCCCGGGACAACTCCAAGAACACCCTGTACCTGCAGATGAACTCCCTGAG |
| | | | | GGCCGAGGACACCGCCGTGTACTACTGTGCCAGGGTGCTGGTCGGCGCTCTGTACTACTACAACT |
| | | | | ACTACGGCATGGACGTGTGGGGCCAGGGCACCACCGTGACAGTGTCTTCC |
| 548. | PSMA-E HCDR1 | artificial | aa | SYGMH |
| 549. | PSMA-E HCDR2 | artificial | aa | VISYDGSNKYYADSVKG |
| 550. | PSMA-E HCDR3 | artificial | aa | VLVGALYYYNYYGMDV |
| 551. | PSMA-E LH | artificial | aa | DIVMTQTPLSLSVTPGQPASISCKSSQSLLHSDGKTFLYWYLQKPGQPPQLLIYEVSNRFSGVPD |
| | | | | RFSGSGSGTDFTLKISRVEAEDVGLYYCMQSIQLPLTFGGGTKVEIKGGGGSGGGGSGGGGSQVQ |
| | | | | LVESGGGVVQPGRSLRLSCAASGFTFISYGMHWVRQAPGKGLEWVAVISYDGSNKYYADSVKGRF |
| | | | | TISRDNSKNTLYLQMNSLRAEDTAVYYCARVLVGALYYYNYYGMDVWGQGTTVTVSS |
| 552. | PSMA-E LH | artificial | nt | GACATCGTGATGACCCAGACCCCTCTGTCCCTGTCTGTGACCCCTGGCCAGCCTGCCTCCATCTC |
| | | | | CTGCAAGTCCTCCCAGTCCCTGCTGCACTCCGACGGCAAGACCTTCCTGTACTGGTATCTGCAGA |
| | | | | AGCCCGGCCAGCCTCCTCAGCTGCTGATCTACGAGGTGTCCAACCGGTTCTCCGGCGTGCCTGAC |
| | | | | AGGTTCTCTGGCTCCGGCTCCGGCACCGACTTCACCCTGAAGATCTCCCGGGTGGAGGCTGAGGA |
| | | | | CGTGGGCCTGTACTACTGCATGCAGTCCATCCAGCTGCCTCTGACCTTCGGCGGAGGGACCAAGG |
| | | | | TGGAGATCAAGGGCGGAGGGGGCTCTGGCGGCGGAGGAAGTGGAGGGGGCGGATCTCAGGTGCAG |
| | | | | CTGGTCGAGTCTGGGGGAGGGGTCGTGCAGCCTGGCCGGTCCCTGAGACTGTCTTGCGCCGCCTC |
| | | | | CGGCTTCACCTTCATCTCTTACGGCATGCACTGGGTGCGCCAGGCTCCAGGCAAGGGACTGGAAT |
| | | | | GGGTGGCCGTGATCTCCTACGACGGCTCCAACAAGTACTACGCCGACTCCGTGAAGGGCCGGTTC |
| | | | | ACCATCTCCCGGGACAACTCCAAGAACACCCTGTACCTGCAGATGAACTCCCTGAGGGCCGAGGA |
| | | | | CACCGCCGTGTACTACTGTGCCAGGGTGCTGGTCGGCGCTCTGTACTACTACAACTACTACGGCA |
| | | | | TGGACGTGTGGGGCCAGGGCACCACCGTGACAGTGTCTTCC |
| 553. | PSMA-E | artificial | aa | DIVMTQTPLSLSVTPGQPASISCKSSQSLLHSDGKTFLYWYLQKPGQPPQLLIYEVSNRFSGVPD |
| | LH x I2C HL | | | RFSGSGSGTDFTLKISRVEAEDVGLYYCMQSIQLPLTFGGGTKVEIKGGGGSGGGGSGGGGSQVQ |
| | | | | LVESGGGVVQPGRSLRLSCAASGFTFISYGMHWVRQAPGKGLEWVAVISYDGSNKYYADSVKGRF |
| | | | | TISRDNSKNTLYLQMNSLRAEDTAVYYCARVLVGALYYYNYYGMDVWGQGTTVTVSSGGGGSEVQ |
| | | | | LVESGGGLVQPGGSLKLSCAASGFTFNKYAMNWVRQAPGKGLEWVARIRSKYNNYATYYADSVKD |
| | | | | RFTISRDDSKNTAYLQMNNLKTEDTAVYYCVRHGNFGNSYISYWAYWGQGTLVTVSSGGGGSGGG |
| | | | | GSGGGGSQTVVTQEPSLTVSPGGTVTLTCGSSTGAVTSGNYPNWVQQKPGQAPRGLIGGTKFLAP |
| | | | | GTPARFSGSLLGGKAALTLSGVQPEDEAEYYCVLWYSNRWVFGGGTKLTVL |
| 554. | PSMA-E | artificial | nt | GACATCGTGATGACCCAGACCCCTCTGTCCCTGTCTGTGACCCCTGGCCAGCCTGCCTCCATCTC |
| | LH x I2C HL | | | CTGCAAGTCCTCCCAGTCCCTGCTGCACTCCGACGGCAAGACCTTCCTGTACTGGTATCTGCAGA |
| | | | | AGCCCGGCCAGCCTCCTCAGCTGCTGATCTACGAGGTGTCCAACCGGTTCTCCGGCGTGCCTGAC |
| | | | | AGGTTCTCTGGCTCCGGCTCCGGCACCGACTTCACCCTGAAGATCTCCCGGGTGGAGGCTGAGGA |
| | | | | CGTGGGCCTGTACTACTGCATGCAGTCCATCCAGCTGCCTCTGACCTTCGGCGGAGGGACCAAGG |
| | | | | TGGAGATCAAGGGCGGAGGGGGCTCTGGCGGCGGAGGAAGTGGAGGGGGCGGATCTCAGGTGCAG |
| | | | | CTGGTCGAGTCTGGGGGAGGGGTCGTGCAGCCTGGCCGGTCCCTGAGACTGTCTTGCGCCGCCTC |
| | | | | CGGCTTCACCTTCATCTCTTACGGCATGCACTGGGTGCGCCAGGCTCCAGGCAAGGGACTGGAAT |
| | | | | GGGTGGCCGTGATCTCCTACGACGGCTCCAACAAGTACTACGCCGACTCCGTGAAGGGCCGGTTC |
| | | | | ACCATCTCCCGGGACAACTCCAAGAACACCCTGTACCTGCAGATGAACTCCCTGAGGGCCGAGGA |
| | | | | CACCGCCGTGTACTACTGTGCCAGGGTGCTGGTCGGCGCTCTGTACTACTACAACTACTACGGCA |
| | | | | TGGACGTGTGGGGCCAGGGCACCACCGTGACAGTGTCTTCCGGAGGTGGTGGATCCGAGGTGCAG |
| | | | | CTGGTCGAGTCTGGAGGAGGATTGGTGCAGCCTGGAGGGTCATTGAAACTCTCATGTGCAGCCTC |
| | | | | TGGATTCACCTTCAATAAGTACGCCATGAACTGGGTCCGCCAGGCTCCAGGAAAGGGTTTGGAAT |
| | | | | GGGTTGCTCGCATAAGAAGTAAATATAATAATTATGCAACATATTATGCCGATTCAGTGAAAGAC |
| | | | | AGGTTCACCATCTCCAGAGATGATTCAAAAAACACTGCCTATCTACAAATGAACAACTTGAAAAC |
| | | | | TGAGGACACTGCCGTGTACTACTGTGTGAGACATGGGAACTTCGGTAATAGCTACATATCCTACT |
| | | | | GGGCTTACTGGGGCCAAGGGACTCTGGTCACCGTCTCCTCAGGTGGTGGTGGTTCTGGCGGCGGC |
| | | | | GGCTCCGGTGGTGGTGGTTCTCAGACTGTTGTGACTCAGGAACCTTCACTCACCGTATCACCTGG |
| | | | | TGGAACAGTCACACTCACTTGTGGCTCCTCGACTGGGGCTGTTACATCTGGCAACTACCCAAACT |
| | | | | GGGTCCAACAAAAACCAGGTCAGGCACCCCGTGGTCTAATAGGTGGGACTAAGTTCCTCGCCCCC |
| | | | | GGTACTCCTGCCAGATTCTCAGGCTCCCTGCTTGGAGGCAAGGCTGCCCTCACCCTCTCAGGGGT |
| | | | | ACAGCCAGAGGATGAGGCAGAATATTACTGTGTTCTATGGTACAGCAACCGCTGGGTGTTCGGTG |
| | | | | GAGGAACCAAACTGACTGTCCTA |
| 555. | PSMA-F VL | artificial | aa | AIQLTQSPSSLSASVGDRVTITCRASQGISSALAWYQQKSGKAPKLLIFDASSLESGVPSRFSGS |
| | | | | GSGTDFTLTISSLQPEDFATYYCQQFNSYPLTFGGGTKVEIK |
| 556. | PSMA-F VL | artificial | nt | GCCATCCAGCTGACCCAGAGTCCCTCCTCCCTGTCTGCCTCCGTGGGCGACAGAGTGACCATCAC |
| | | | | CTGCCGGGCCTCCCAGGGCATCTCTTCCGCCCTGGCCTGGTATCAGCAGAAGTCCGGCAAGGCCC |
| | | | | CTAAGCTGCTGATCTTCGACGCCTCCTCTCTGGAATCCGGCGTGCCTTCCCGGTTCTCCGGCTCT |
| | | | | GGCTCCGGCACCGACTTCACCCTGACCATCTCCAGCCTGCAGCCTGAGGACTTCGCCACCTACTA |
| | | | | CTGCCAGCAGTTCAACTCCTACCCTCTGACCTTCGGCGGAGGGACCAAGGTGGAGATCAAG |
| 557. | PSMA-F LCDR1 | artificial | aa | RASQGISSALA |
| 558. | PSMA-F LCDR2 | artificial | aa | DASSLES |
| 559. | PSMA-F LCDR3 | artificial | aa | QQFNSYPLT |
| 560. | PSMA-F VH | artificial | aa | QVQLVESGGGVVQPGRSLRLSCAASGFTFSSYAMHWVRQAPGKGLEWVAVISYDGNNKYYADSVK |
| | | | | GRFTISRDNSKNTLYLQMNSLRAEDTAVYYCARAVPWGSRYYYYGMDVWGQGTTVTVSS |
| 561. | PSMA-F VH | artificial | nt | CAGGTGCAGCTGGTCGAGTCTGGGGGAGGGGTCGTGCAGCCTGGCCGGTCCCTGAGACTGTCTTG |
| | | | | CGCCGCCTCCGGCTTCACCTTCTCCTCTTACGCCATGCACTGGGTGCGCCAGGCTCCAGGCAAGG |
| | | | | GACTGGAATGGGTGGCCGTGATCTCCTACGACGGCAACAACAAGTACTACGCCGACTCCGTGAAG |
| | | | | GGCCGGTTCACCATCTCCCGGGACAACTCCAAGAACACCCTGTACCTGCAGATGAACTCCCTGAG |
| | | | | GGCTGAGGACACCGCCGTGTACTACTGCGCCAGAGCCGTGCCTTGGGGCTCCCGGTACTACTACT |
| | | | | ACGGCATGGACGTGTGGGGCCAGGGCACCACCGTGACAGTGTCTTCC |
| 562. | PSMA-F HCDR1 | artificial | aa | SYAMH |
| 563. | PSMA-F HCDR2 | artificial | aa | VISYDGNNKYYADSVKG |
| 564. | PSMA-F HCDR3 | artificial | aa | AVPWGSRYYYYGMDV |
| 565. | PSMA-F LH | artificial | aa | AIQLTQSPSSLSASVGDRVTITCRASQGISSALAWYQQKSGKAPKLLIFDASSLESGVPSRFSGS |
| | | | | GSGTDFTLTISSLQPEDFATYYCQQFNSYPLTFGGGTKVEIKGGGGSGGGGSGGGGSQVQLVESG |
| | | | | GGVVQPGRSLRLSCAASGFTFSSYAMHWVRQAPGKGLEWVAVISYDGNNKYYADSVKGRFTISRD |
| | | | | NSKNTLYLQMNSLRAEDTAVYYCARAVPWGSRYYYYGMDVWGQGTTVTVSS |
| 566. | PSMA-F LH | artificial | nt | GCCATCCAGCTGACCCAGAGTCCCTCCTCCCTGTCTGCCTCCGTGGGCGACAGAGTGACCATCAC |
| | | | | CTGCCGGGCCTCCCAGGGCATCTCTTCCGCCCTGGCCTGGTATCAGCAGAAGTCCGGCAAGGCCC |
| | | | | CTAAGCTGCTGATCTTCGACGCCTCCTCTCTGGAATCCGGCGTGCCTTCCCGGTTCTCCGGCTCT |
| | | | | GGCTCCGGCACCGACTTCACCCTGACCATCTCCAGCCTGCAGCCTGAGGACTTCGCCACCTACTA |
| | | | | CTGCCAGCAGTTCAACTCCTACCCTCTGACCTTCGGCGGAGGGACCAAGGTGGAGATCAAGGGCG |
| | | | | GAGGGGGCTCTGGCGGCGGAGGAAGTGGAGGGGGCGGATCTCAGGTGCAGCTGGTCGAGTCTGGG |
| | | | | GGAGGGGTCGTGCAGCCTGGCCGGTCCCTGAGACTGTCTTGCGCCGCCTCCGGCTTCACCTTCTC |
| | | | | CTCTTACGCCATGCACTGGGTGCGCCAGGCTCCAGGCAAGGGACTGGAATGGGTGGCCGTGATCT |
| | | | | CCTACGACGGCAACAACAAGTACTACGCCGACTCCGTGAAGGGCCGGTTCACCATCTCCCGGGAC |
| | | | | AACTCCAAGAACACCCTGTACCTGCAGATGAACTCCCTGAGGGCTGAGGACACCGCCGTGTACTA |
| | | | | CTGCGCCAGAGCCGTGCCTTGGGGCTCCCGGTACTACTACTACGGCATGGACGTGTGGGGCCAGG |
| | | | | GCACCACCGTGACAGTGTCTTCC |
| 567. | PSMA-F | artificial | aa | AIQLTQSPSSLSASVGDRVTITCRASQGISSALAWYQQKSGKAPKLLIFDASSLESGVPSRFSGS |
| | LH x I2C HL | | | GSGTDFTLTISSLQPEDFATYYCQQFNSYPLTFGGGTKVEIKGGGGSGGGGSGGGGSQVQLVESG |
| | | | | GGVVQPGRSLRLSCAASGFTFSSYAMHWVRQAPGKGLEWVAVISYDGNNKYYADSVKGRFTISRD |
| | | | | NSKNTLYLQMNSLRAEDTAVYYCARAVPWGSRYYYYGMDVWGQGTTVTVSSGGGGSEVQLVESGG |
| | | | | GLVQPGGSLKLSCAASGFTFNKYAMNWVRQAPGKGLEWVARIRSKYNNYATYYADSVKDRFTISR |
| | | | | DDSKNTAYLQMNNLKTEDTAVYYCVRHGNFGNSYISYWAYWGQGTLVTVSSGGGGSGGGGSGGGG |
| | | | | SQTVVTQEPSLTVSPGGTVTLTCGSSTGAVTSGNYPNWVQQKPGQAPRGLIGGTKFLAPGTPARF |
| | | | | SGSLLGGKAALTLSGVQPEDEAEYYCVLWYSNRWVFGGGTKLTVL |
| 568. | PSMA-F | artificial | nt | GCCATCCAGCTGACCCAGAGTCCCTCCTCCCTGTCTGCCTCCGTGGGCGACAGAGTGACCATCAC |
| | LH x I2C HL | | | CTGCCGGGCCTCCCAGGGCATCTCTTCCGCCCTGGCCTGGTATCAGCAGAAGTCCGGCAAGGCCC |
| | | | | CTAAGCTGCTGATCTTCGACGCCTCCTCTCTGGAATCCGGCGTGCCTTCCCGGTTCTCCGGCTCT |
| | | | | GGCTCCGGCACCGACTTCACCCTGACCATCTCCAGCCTGCAGCCTGAGGACTTCGCCACCTACTA |
| | | | | CTGCCAGCAGTTCAACTCCTACCCTCTGACCTTCGGCGGAGGGACCAAGGTGGAGATCAAGGGCG |
| | | | | GAGGGGGCTCTGGCGGCGGAGGAAGTGGAGGGGGCGGATCTCAGGTGCAGCTGGTCGAGTCTGGG |
| | | | | GGAGGGGTCGTGCAGCCTGGCCGGTCCCTGAGACTGTCTTGCGCCGCCTCCGGCTTCACCTTCTC |
| | | | | CTCTTACGCCATGCACTGGGTGCGCCAGGCTCCAGGCAAGGGACTGGAATGGGTGGCCGTGATCT |
| | | | | CCTACGACGGCAACAACAAGTACTACGCCGACTCCGTGAAGGGCCGGTTCACCATCTCCCGGGAC |
| | | | | AACTCCAAGAACACCCTGTACCTGCAGATGAACTCCCTGAGGGCTGAGGACACCGCCGTGTACTA |
| | | | | CTGCGCCAGAGCCGTGCCTTGGGGCTCCCGGTACTACTACTACGGCATGGACGTGTGGGGCCAGG |
| | | | | GCACCACCGTGACAGTGTCTTCCGGAGGTGGTGGATCCGAGGTGCAGCTGGTCGAGTCTGGAGGA |
| | | | | GGATTGGTGCAGCCTGGAGGGTCATTGAAACTCTCATGTGCAGCCTCTGGATTCACCTTCAATAA |
| | | | | GTACGCCATGAACTGGGTCCGCCAGGCTCCAGGAAAGGGTTTGGAATGGGTTGCTCGCATAAGAA |
| | | | | GTAAATATAATAATTATGCAACATATTATGCCGATTCAGTGAAAGACAGGTTCACCATCTCCAGA |
| | | | | GATGATTCAAAAAACACTGCCTATCTACAAATGAACAACTTGAAAACTGAGGACACTGCCGTGTA |
| | | | | CTACTGTGTGAGACATGGGAACTTCGGTAATAGCTACATATCCTACTGGGCTTACTGGGGCCAAG |
| | | | | GGACTCTGGTCACCGTCTCCTCAGGTGGTGGTGGTTCTGGCGGCGGCGGCTCCGGTGGTGGTGGT |
| | | | | TCTCAGACTGTTGTGACTCAGGAACCTTCACTCACCGTATCACCTGGTGGAACAGTCACACTCAC |
| | | | | TTGTGGCTCCTCGACTGGGGCTGTTACATCTGGCAACTACCCAAACTGGGTCCAACAAAAACCAG |
| | | | | GTCAGGCACCCCGTGGTCTAATAGGTGGGACTAAGTTCCTCGCCCCCGGTACTCCTGCCAGATTC |
| | | | | TCAGGCTCCCTGCTTGGAGGCAAGGCTGCCCTCACCCTCTCAGGGGTACAGCCAGAGGATGAGGC |
| | | | | AGAATATTACTGTGTTCTATGGTACAGCAACCGCTGGGTGTTCGGTGGAGGAACCAAACTGACTG |
| | | | | TCCTA |
| 569. | PSMA-J VL | artificial | aa | EIVLTQSPATLSLSPGERATLSCRASQSVSSYLAWFQQKPGQAPRLLIYDASNRATGIPARFSGS |
| | | | | GSGTDFTLTISSLEPEDFAVYYCQQRSNWLMYTFGQGTKLEIK |
| 570. | PSMA-J VL | artificial | nt | GAGATCGTGCTGACCCAGTCCCCTGCCACCCTGTCTCTGTCTCCCGGCGAGAGAGCCACCCTGAG |
| | | | | CTGCCGGGCCTCCCAGTCCGTGTCCTCCTACCTGGCCTGGTTCCAGCAGAAGCCTGGACAGGCCC |
| | | | | CTAGGCTGCTGATCTACGACGCCTCCAACAGGGCTACCGGCATCCCTGCCCGGTTCTCCGGCTCT |
| | | | | GGCTCCGGCACCGACTTCACCCTGACCATCTCCAGCCTGGAACCTGAGGACTTCGCCGTGTACTA |
| | | | | CTGCCAGCAGCGGTCCAACTGGCTGATGTATACCTTCGGCCAGGGCACCAAGCTGGAAATCAAG |
| 571. | PSMA-J LCDR1 | artificial | aa | RASQSVSSYLA |
| 572. | PSMA-J LCDR2 | artificial | aa | DASNRAT |
| 573. | PSMA-J LCDR3 | artificial | aa | QQRSNWLMYT |
| 574. | PSMA-J VH | artificial | aa | EVQLVQSGAEVKKPGESLKISCKGSGYSFTSYWIGWARQMPGKGLEWMGIIYPGDSDTRYSPSFQ |
| | | | | GQVTISADKSISTAYLQWSSLKASDTAMYYCSAANSSHWYFDLWGRGTLVTVSS |
| 575. | PSMA-J VH | artificial | nt | GAAGTGCAGCTGGTGCAGTCTGGCGCCGAAGTGAAGAAGCCCGGCGAGTCCCTGAAGATCTCCTG |
| | | | | CAAGGGCTCCGGGTACTCCTTCACCTCCTACTGGATCGGCTGGGCCAGGCAGATGCCAGGCAAGG |
| | | | | GCCTGGAATGGATGGGCATCATCTACCCTGGCGACTCCGACACCCGGTACTCTCCCAGCTTCCAG |
| | | | | GGCCAGGTGACCATCTCTGCCGACAAGTCCATCTCCACCGCCTACCTGCAGTGGTCCTCCCTGAA |
| | | | | GGCCTCCGACACCGCCATGTACTATTGCTCCGCCGCCAACTCCTCCCACTGGTACTTCGACCTGT |
| | | | | GGGGCAGAGGCACCCTGGTGACCGTGTCTTCC |
| 576. | PSMA-J HCDR1 | artificial | aa | SYWIG |
| 577. | PSMA-J HCDR2 | artificial | aa | IIYPGDSDTRYSPSFQG |
| 578. | PSMA-J HCDR3 | artificial | aa | ANSSHWYFDL |
| 579. | PSMA-J LH | artificial | aa | EIVLTQSPATLSLSPGERATLSCRASQSVSSYLAWFQQKPGQAPRLLIYDASNRATGIPARFSGS |
| | | | | GSGTDFTLTISSLEPEDFAVYYCQQRSNWLMYTFGQGTKLEIKGGGGSGGGGSGGGGSEVQLVQS |
| | | | | GAEVKKPGESLKISCKGSGYSFTSYWIGWARQMPGKGLEWMGIIYPGDSDTRYSPSFQGQVTISA |
| | | | | DKSISTAYLQWSSLKASDTAMYYCSAANSSHWYFDLWGRGTLVTVSS |
| 580. | PSMA-J LH | artificial | nt | GAGATCGTGCTGACCCAGTCCCCTGCCACCCTGTCTCTGTCTCCCGGCGAGAGAGCCACCCTGAG |
| | | | | CTGCCGGGCCTCCCAGTCCGTGTCCTCCTACCTGGCCTGGTTCCAGCAGAAGCCTGGACAGGCCC |
| | | | | CTAGGCTGCTGATCTACGACGCCTCCAACAGGGCTACCGGCATCCCTGCCCGGTTCTCCGGCTCT |
| | | | | GGCTCCGGCACCGACTTCACCCTGACCATCTCCAGCCTGGAACCTGAGGACTTCGCCGTGTACTA |
| | | | | CTGCCAGCAGCGGTCCAACTGGCTGATGTATACCTTCGGCCAGGGCACCAAGCTGGAAATCAAGG |
| | | | | GCGGAGGGGGATCTGGGGGCGGAGGAAGTGGAGGGGGCGGATCCGAAGTGCAGCTGGTGCAGTCT |
| | | | | GGCGCCGAAGTGAAGAAGCCCGGCGAGTCCCTGAAGATCTCCTGCAAGGGCTCCGGGTACTCCTT |
| | | | | CACCTCCTACTGGATCGGCTGGGCCAGGCAGATGCCAGGCAAGGGCCTGGAATGGATGGGCATCA |
| | | | | TCTACCCTGGCGACTCCGACACCCGGTACTCTCCCAGCTTCCAGGGCCAGGTGACCATCTCTGCC |
| | | | | GACAAGTCCATCTCCACCGCCTACCTGCAGTGGTCCTCCCTGAAGGCCTCCGACACCGCCATGTA |
| | | | | CTATTGCTCCGCCGCCAACTCCTCCCACTGGTACTTCGACCTGTGGGGCAGAGGCACCCTGGTGA |
| | | | | CCGTGTCTTCC |
| 581. | PSMA-J | artificial | aa | EIVLTQSPATLSLSPGERATLSCRASQSVSSYLAWFQQKPGQAPRLLIYDASNRATGIPARFSGS |
| | LH x I2C HL | | | GSGTDFTLTISSLEPEDFAVYYCQQRSNWLMYTFGQGTKLEIKGGGGSGGGGSGGGGSEVQLVQS |
| | | | | GAEVKKPGESLKISCKGSGYSFTSYWIGWARQMPGKGLEWMGIIYPGDSDTRYSPSFQGQVTISA |
| | | | | DKSISTAYLQWSSLKASDTAMYYCSAANSSHWYFDLWGRGTLVTVSSGGGGSEVQLVESGGGLVQ |
| | | | | PGGSLKLSCAASGFTFNKYAMNWVRQAPGKGLEWVARIRSKYNNYATYYADSVKDRFTISRDDSK |
| | | | | NTAYLQMNNLKTEDTAVYYCVRHGNFGNSYISYWAYWGQGTLVTVSSGGGGSGGGGSGGGGSQTV |
| | | | | VTQEPSLTVSPGGTVTLTCGSSTGAVTSGNYPNWVQQKPGQAPRGLIGGTKFLAPGTPARFSGSL |
| | | | | LGGKAALTLSGVQPEDEAEYYCVLWYSNRWVFGGGTKLTVL |
| 582. | PSMA-J LH x | artificial | nt | GAGATCGTGCTGACCCAGTCCCCTGCCACCCTGTCTCTGTCTCCCGGCGAGAGAGCCACCCTGAG |
| | I2C HL | | | CTGCCGGGCCTCCCAGTCCGTGTCCTCCTACCTGGCCTGGTTCCAGCAGAAGCCTGGACAGGCCC |
| | | | | CTAGGCTGCTGATCTACGACGCCTCCAACAGGGCTACCGGCATCCCTGCCCGGTTCTCCGGCTCT |
| | | | | GGCTCCGGCACCGACTTCACCCTGACCATCTCCAGCCTGGAACCTGAGGACTTCGCCGTGTACTA |
| | | | | CTGCCAGCAGCGGTCCAACTGGCTGATGTATACCTTCGGCCAGGGCACCAAGCTGGAAATCAAGG |
| | | | | GCGGAGGGGGATCTGGGGGCGGAGGAAGTGGAGGGGGCGGATCCGAAGTGCAGCTGGTGCAGTCT |
| | | | | GGCGCCGAAGTGAAGAAGCCCGGCGAGTCCCTGAAGATCTCCTGCAAGGGCTCCGGGTACTCCTT |
| | | | | CACCTCCTACTGGATCGGCTGGGCCAGGCAGATGCCAGGCAAGGGCCTGGAATGGATGGGCATCA |
| | | | | TCTACCCTGGCGACTCCGACACCCGGTACTCTCCCAGCTTCCAGGGCCAGGTGACCATCTCTGCC |
| | | | | GACAAGTCCATCTCCACCGCCTACCTGCAGTGGTCCTCCCTGAAGGCCTCCGACACCGCCATGTA |
| | | | | CTATTGCTCCGCCGCCAACTCCTCCCACTGGTACTTCGACCTGTGGGGCAGAGGCACCCTGGTGA |
| | | | | CCGTGTCTTCCGGAGGTGGTGGATCCGAGGTGCAGCTGGTCGAGTCTGGAGGAGGATTGGTGCAG |
| | | | | CCTGGAGGGTCATTGAAACTCTCATGTGCAGCCTCTGGATTCACCTTCAATAAGTACGCCATGAA |
| | | | | CTGGGTCCGCCAGGCTCCAGGAAAGGGTTTGGAATGGGTTGCTCGCATAAGAAGTAAATATAATA |
| | | | | ATTATGCAACATATTATGCCGATTCAGTGAAAGACAGGTTCACCATCTCCAGAGATGATTCAAAA |
| | | | | AACACTGCCTATCTACAAATGAACAACTTGAAAACTGAGGACACTGCCGTGTACTACTGTGTGAG |
| | | | | ACATGGGAACTTCGGTAATAGCTACATATCCTACTGGGCTTACTGGGGCCAAGGGACTCTGGTCA |
| | | | | CCGTCTCCTCAGGTGGTGGTGGTTCTGGCGGCGGCGGCTCCGGTGGTGGTGGTTCTCAGACTGTT |
| | | | | GTGACTCAGGAACCTTCACTCACCGTATCACCTGGTGGAACAGTCACACTCACTTGTGGCTCCTC |
| | | | | GACTGGGGCTGTTACATCTGGCAACTACCCAAACTGGGTCCAACAAAAACCAGGTCAGGCACCCC |
| | | | | GTGGTCTAATAGGTGGGACTAAGTTCCTCGCCCCCGGTACTCCTGCCAGATTCTCAGGCTCCCTG |
| | | | | CTTGGAGGCAAGGCTGCCCTCACCCTCTCAGGGGTACAGCCAGAGGATGAGGCAGAATATTACTG |
| | | | | TGTTCTATGGTACAGCAACCGCTGGGTGTTCGGTGGAGGAACCAAACTGACTGTCCTA |
| 583. | PSMA-L VL | artificial | aa | EIVLTQSPATLSLSPGERATLSCRASQSVSSYLAWYQQKPGQAPRLLIYDASNRATGIPARFSGS |
| | | | | GSGTDFTLTISSLEPEDFAVYYCQQRSDWLMYTFGQGTKLEIK |
| 584. | PSMA-L VL | artificial | nt | GAGATCGTGCTGACCCAGTCCCCTGCCACCCTGTCTCTGTCTCCCGGCGAGAGAGCCACCCTGAG |
| | | | | CTGCCGGGCCTCCCAGTCCGTGTCCTCCTACCTGGCCTGGTATCAGCAGAAGCCTGGACAGGCCC |
| | | | | CTAGGCTGCTGATCTACGACGCCTCCAACAGGGCTACCGGCATCCCTGCCCGGTTCTCCGGCTCT |
| | | | | GGCTCCGGCACCGACTTCACCCTGACCATCTCCAGCCTGGAACCTGAGGACTTCGCCGTGTACTA |
| | | | | CTGCCAGCAGCGGTCCGACTGGCTGATGTATACCTTCGGCCAGGGCACCAAGCTGGAAATCAAG |
| 585. | PSMA-L LCDR1 | artificial | aa | RASQSVSSYLA |
| 586. | PSMA-L LCDR2 | artificial | aa | DASNRAT |
| 587. | PSMA-L LCDR3 | artificial | aa | QQRSDWLMYT |
| 588. | PSMA-L VH | artificial | aa | EVQLVQSGAEVKTPGESLKISCKGSGYTFTSYWIGWVRQMPGKGPEWMGIIYPGDSDTRYSPSFQ |
| | | | | GQVTFSADKSISTAYLQWNSLKTSDTAMYYCATANPSYWYFDLWGRGTLVTVSS |
| 589. | PSMA-L VH | artificial | nt | GAAGTGCAGCTGGTGCAGTCTGGCGCCGAAGTGAAAACCCCTGGCGAGTCCCTGAAGATCTCCTG |
| | | | | CAAGGGCTCCGGCTACACCTTCACCTCTTACTGGATCGGCTGGGTGCGCCAGATGCCTGGCAAGG |
| | | | | GCCCTGAGTGGATGGGCATCATCTACCCTGGCGACTCCGACACCCGGTACTCTCCCAGCTTCCAG |
| | | | | GGCCAGGTGACCTTCTCCGCCGACAAGTCCATCTCCACCGCCTACCTGCAGTGGAACTCCCTGAA |
| | | | | AACCTCCGACACCGCCATGTACTATTGCGCCACCGCCAACCCTAGCTACTGGTACTTCGACCTGT |
| | | | | GGGGCAGAGGCACCCTGGTGACCGTGTCTTCC |
| 590. | PSMA-L HCDR1 | artificial | aa | SYWIG |
| 591. | PSMA-L HCDR2 | artificial | aa | IIYPGDSDTRYSPSFQG |
| 592. | PSMA-L HCDR3 | artificial | aa | ANPSYWYFDL |
| 593. | PSMA-L LH | artificial | aa | EIVLTQSPATLSLSPGERATLSCRASQSVSSYLAWYQQKPGQAPRLLIYDASNRATGIPARFSGS |
| | | | | GSGTDFTLTISSLEPEDFAVYYCQQRSDWLMYTFGQGTKLEIKGGGGSGGGGSGGGGSEVQLVQS |
| | | | | GAEVKTPGESLKISCKGSGYTFTSYWIGWVRQMPGKGPEWMGIIYPGDSDTRYSPSFQGQVTFSA |
| | | | | DKSISTAYLQWNSLKTSDTAMYYCATANPSYWYFDLWGRGTLVTVSS |
| 594. | PSMA-L LH | artificial | nt | GAGATCGTGCTGACCCAGTCCCCTGCCACCCTGTCTCTGTCTCCCGGCGAGAGAGCCACCCTGAG |
| | | | | CTGCCGGGCCTCCCAGTCCGTGTCCTCCTACCTGGCCTGGTATCAGCAGAAGCCTGGACAGGCCC |
| | | | | CTAGGCTGCTGATCTACGACGCCTCCAACAGGGCTACCGGCATCCCTGCCCGGTTCTCCGGCTCT |
| | | | | GGCTCCGGCACCGACTTCACCCTGACCATCTCCAGCCTGGAACCTGAGGACTTCGCCGTGTACTA |
| | | | | CTGCCAGCAGCGGTCCGACTGGCTGATGTATACCTTCGGCCAGGGCACCAAGCTGGAAATCAAGG |
| | | | | GCGGAGGGGGATCTGGCGGCGGAGGAAGTGGAGGGGGCGGATCCGAAGTGCAGCTGGTGCAGTCT |
| | | | | GGCGCCGAAGTGAAAACCCCTGGCGAGTCCCTGAAGATCTCCTGCAAGGGCTCCGGCTACACCTT |
| | | | | CACCTCTTACTGGATCGGCTGGGTGCGCCAGATGCCTGGCAAGGGCCCTGAGTGGATGGGCATCA |
| | | | | TCTACCCTGGCGACTCCGACACCCGGTACTCTCCCAGCTTCCAGGGCCAGGTGACCTTCTCCGCC |
| | | | | GACAAGTCCATCTCCACCGCCTACCTGCAGTGGAACTCCCTGAAAACCTCCGACACCGCCATGTA |
| | | | | CTATTGCGCCACCGCCAACCCTAGCTACTGGTACTTCGACCTGTGGGGCAGAGGCACCCTGGTGA |
| | | | | CCGTGTCTTCC |
| 595. | PSMA-L LH x | artificial | aa | EIVLTQSPATLSLSPGERATLSCRASQSVSSYLAWYQQKPGQAPRLLIYDASNRATGIPARFSGS |
| | I2C HL | | | GSGTDFTLTISSLEPEDFAVYYCQQRSDWLMYTFGQGTKLEIKGGGGSGGGGSGGGGSEVQLVQS |
| | | | | GAEVKTPGESLKISCKGSGYTFTSYWIGWVRQMPGKGPEWMGIIYPGDSDTRYSPSFQGQVTFSA |
| | | | | DKSISTAYLQWNSLKTSDTAMYYCATANPSYWYFDLWGRGTLVTVSSGGGGSEVQLVESGGGLVQ |
| | | | | PGGSLKLSCAASGFTFNKYAMNWVRQAPGKGLEWVARIRSKYNNYATYYADSVKDRFTISRDDSK |
| | | | | NTAYLQMNNLKTEDTAVYYCVRHGNFGNSYISYWAYWGQGTLVTVSSGGGGSGGGGSGGGGSQTV |
| | | | | VTQEPSLTVSPGGTVTLTCGSSTGAVTSGNYPNWVQQKPGQAPRGLIGGTKFLAPGTPARFSGSL |
| | | | | LGGKAALTLSGVQPEDEAEYYCVLWYSNRWVFGGGTKLTVL |
| 596. | PSMA-L LH x | artificial | nt | GAGATCGTGCTGACCCAGTCCCCTGCCACCCTGTCTCTGTCTCCCGGCGAGAGAGCCACCCTGAG |
| | I2C HL | | | CTGCCGGGCCTCCCAGTCCGTGTCCTCCTACCTGGCCTGGTATCAGCAGAAGCCTGGACAGGCCC |
| | | | | CTAGGCTGCTGATCTACGACGCCTCCAACAGGGCTACCGGCATCCCTGCCCGGTTCTCCGGCTCT |
| | | | | GGCTCCGGCACCGACTTCACCCTGACCATCTCCAGCCTGGAACCTGAGGACTTCGCCGTGTACTA |
| | | | | CTGCCAGCAGCGGTCCGACTGGCTGATGTATACCTTCGGCCAGGGCACCAAGCTGGAAATCAAGG |
| | | | | GCGGAGGGGGATCTGGCGGCGGAGGAAGTGGAGGGGGCGGATCCGAAGTGCAGCTGGTGCAGTCT |
| | | | | GGCGCCGAAGTGAAAACCCCTGGCGAGTCCCTGAAGATCTCCTGCAAGGGCTCCGGCTACACCTT |
| | | | | CACCTCTTACTGGATCGGCTGGGTGCGCCAGATGCCTGGCAAGGGCCCTGAGTGGATGGGCATCA |
| | | | | TCTACCCTGGCGACTCCGACACCCGGTACTCTCCCAGCTTCCAGGGCCAGGTGACCTTCTCCGCC |
| | | | | GACAAGTCCATCTCCACCGCCTACCTGCAGTGGAACTCCCTGAAAACCTCCGACACCGCCATGTA |
| | | | | CTATTGCGCCACCGCCAACCCTAGCTACTGGTACTTCGACCTGTGGGGCAGAGGCACCCTGGTGA |
| | | | | CCGTGTCTTCCGGAGGTGGTGGATCCGAGGTGCAGCTGGTCGAGTCTGGAGGAGGATTGGTGCAG |
| | | | | CCTGGAGGGTCATTGAAACTCTCATGTGCAGCCTCTGGATTCACCTTCAATAAGTACGCCATGAA |
| | | | | CTGGGTCCGCCAGGCTCCAGGAAAGGGTTTGGAATGGGTTGCTCGCATAAGAAGTAAATATAATA |
| | | | | ATTATGCAACATATTATGCCGATTCAGTGAAAGACAGGTTCACCATCTCCAGAGATGATTCAAAA |
| | | | | AACACTGCCTATCTACAAATGAACAACTTGAAAACTGAGGACACTGCCGTGTACTACTGTGTGAG |
| | | | | ACATGGGAACTTCGGTAATAGCTACATATCCTACTGGGCTTACTGGGGCCAAGGGACTCTGGTCA |
| | | | | CCGTCTCCTCAGGTGGTGGTGGTTCTGGCGGCGGCGGCTCCGGTGGTGGTGGTTCTCAGACTGTT |
| | | | | GTGACTCAGGAACCTTCACTCACCGTATCACCTGGTGGAACAGTCACACTCACTTGTGGCTCCTC |
| | | | | GACTGGGGCTGTTACATCTGGCAACTACCCAAACTGGGTCCAACAAAAACCAGGTCAGGCACCCC |
| | | | | GTGGTCTAATAGGTGGGACTAAGTTCCTCGCCCCCGGTACTCCTGCCAGATTCTCAGGCTCCCTG |
| | | | | CTTGGAGGCAAGGCTGCCCTCACCCTCTCAGGGGTACAGCCAGAGGATGAGGCAGAATATTACTG |
| | | | | TGTTCTATGGTACAGCAACCGCTGGGTGTTCGGTGGAGGAACCAAACTGACTGTCCTA |
| 597. | PM 99-A8 VL | artificial | aa | DIQMTQSPSTLAASAGEKVTITCRASSSVTYMHWYQQKPGKAPKLLIYDTSKVASGVPSRFSGSG |
| | | | | SGTAFTLTISSVQTDDFATYYCQQWSRNSPYTFGQGTKLEIK |
| 598. | PM 99-A8 VL | artificial | nt | GACATCCAGATGACTCAGTCTCCATCAACCCTGGCTGCATCTGCGGGGGAGAAAGTCACCATCAC |
| | | | | CTGCCGTGCCAGCTCCAGTGTGACTTACATGCACTGGTACCAGCAGAAGCCAGGCAAAGCCCCTA |
| | | | | AATTATTGATTTATGACACATCCAAAGTGGCTTCTGGAGTCCCAAGTCGCTTCAGTGGCAGTGGG |
| | | | | TCTGGGACCGCATTTACTCTCACAATCAGCTCCGTGCAGACTGATGACTTTGCCACTTATTACTG |
| | | | | TCAGCAGTGGAGTAGGAACTCACCCTACACGTTTGGACAGGGGACCAAGCTGGAAATCAAA |
| 599. | PM 99-A8 | artificial | aa | RASSSVTYMH |
| | LCDR1 | | | |
| 600. | PM 99-A8 | artificial | aa | DTSKVAS |
| | LCDR2 | | | |
| 601. | PM 99-A8 | artificial | aa | QQWSRNSPYT |
| | LCDR3 | | | |
| 602. | PM 99-A8 VH | artificial | aa | EVQLLESGGGLVQPGGSLRLSCAASGFTFSDFFMAWVRQAPGKGLEWVATIVSDGGSTYYRDSVK |
| | | | | GRFTISRDNAKNTLYLQMDSLRAEDTAVYYCAKRGNSGYYVMDAWGQGTTVTVSS |
| 603. | PM 99-A8 VH | artificial | nt | GAGGTGCAGCTGCTCGAGTCTGGTGGAGGCTTAGTGCAGCCTGGAGGGTCCCTAAGACTCTCCTG |
| | | | | TGCAGCCTCAGGATTCACTTTCAGTGACTTTTTCATGGCCTGGGTCCGCCAGGCTCCAGGGAAGG |
| | | | | GGCTGGAGTGGGTCGCAACCATTGTTTCTGATGGTGGTAGCACTTACTATCGCGACTCCGTGAAG |
| | | | | GGCCGTTTCACTATCTCCAGAGATAATGCAAAAAACACCCTGTACCTGCAAATGGACAGTCTGAG |
| | | | | GGCTGAGGACACGGCCGTTTATTACTGTGCAAAACGCGGCAATTCGGGGTACTATGTTATGGATG |
| | | | | CCTGGGGTCAAGGAACTACGGTCACCGTCTCCTCA |
| 604. | PM 99-A8 | artificial | aa | DFFMA |
| | HCDR1 | | | |
| 605. | PM 99-A8 | artificial | aa | TIVSDGGSTYYRDSVKG |
| | HCDR2 | | | |
| 606. | PM 99-A8 | artificial | aa | RGNSGYYVMDA |
| | HCDR3 | | | |
| 607. | PM 99-A8 HL | artificial | aa | EVQLLESGGGLVQPGGSLRLSCAASGFTFSDFFMAWVRQAPGKGLEWVATIVSDGGSTYYRDSVK |
| | | | | GRFTISRDNAKNTLYLQMDSLRAEDTAVYYCAKRGNSGYYVMDAWGQGTTVTVSSGGGGSGGGGS |
| | | | | GGGGSDIQMTQSPSTLAASAGEKVTITCRASSSVTYMHWYQQKPGKAPKLLIYDTSKVASGVPSR |
| | | | | FSGSGSGTAFTLTISSVQTDDFATYYCQQWSRNSPYTFGQGTKLEIK |
| 608. | PM 99-A8 HL | artificial | nt | GAGGTGCAGCTGCTCGAGTCTGGTGGAGGCTTAGTGCAGCCTGGAGGGTCCCTAAGACTCTCCTG |
| | | | | TGCAGCCTCAGGATTCACTTTCAGTGACTTTTTCATGGCCTGGGTCCGCCAGGCTCCAGGGAAGG |
| | | | | GGCTGGAGTGGGTCGCAACCATTGTTTCTGATGGTGGTAGCACTTACTATCGCGACTCCGTGAAG |
| | | | | GGCCGTTTCACTATCTCCAGAGATAATGCAAAAAACACCCTGTACCTGCAAATGGACAGTCTGAG |
| | | | | GGCTGAGGACACGGCCGTTTATTACTGTGCAAAACGCGGCAATTCGGGGTACTATGTTATGGATG |
| | | | | CCTGGGGTCAAGGAACTACGGTCACCGTCTCCTCAGGTGGTGGTGGTTCTGGCGGCGGCGGCTCC |
| | | | | GGTGGTGGTGGTTCTGACATCCAGATGACTCAGTCTCCATCAACCCTGGCTGCATCTGCGGGGGA |
| | | | | GAAAGTCACCATCACCTGCCGTGCCAGCTCCAGTGTGACTTACATGCACTGGTACCAGCAGAAGC |
| | | | | CAGGCAAAGCCCCTAAATTATTGATTTATGACACATCCAAAGTGGCTTCTGGAGTCCCAAGTCGC |
| | | | | TTCAGTGGCAGTGGGTCTGGGACCGCATTTACTCTCACAATCAGCTCCGTGCAGACTGATGACTT |
| | | | | TGCCACTTATTACTGTCAGCAGTGGAGTAGGAACTCACCCTACACGTTTGGACAGGGGACCAAGC |
| | | | | TGGAAATCAAA |
| 609. | PM 99-A8 HL x | artificial | aa | EVQLLESGGGLVQPGGSLRLSCAASGFTFSDFFMAWVRQAPGKGLEWVATIVSDGGSTYYRDSVK |
| | I2C HL | | | GRFTISRDNAKNTLYLQMDSLRAEDTAVYYCAKRGNSGYYVMDAWGQGTTVTVSSGGGGSGGGGS |
| | | | | GGGGSDIQMTQSPSTLAASAGEKVTITCRASSSVTYMHWYQQKPGKAPKLLIYDTSKVASGVPSR |
| | | | | FSGSGSGTAFTLTISSVQTDDFATYYCQQWSRNSPYTFGQGTKLEIKSGGGGSEVQLVESGGGLV |
| | | | | QPGGSLKLSCAASGFTFNKYAMNWVRQAPGKGLEWVARIRSKYNNYATYYADSVKDRFTISRDDS |
| | | | | KNTAYLQMNNLKTEDTAVYYCVRHGNFGNSYISYWAYWGQGTLVTVSSGGGGSGGGGSGGGGSQT |
| | | | | VVTQEPSLTVSPGGTVTLTCGSSTGAVTSGNYPNWVQQKPGQAPRGLIGGTKFLAPGTPARFSGS |
| | | | | LLGGKAALTLSGVQPEDEAEYYCVLWYSNRWVFGGGTKLTVL |
| 610. | PM 99-A8 HL x | artificial | nt | GAGGTGCAGCTGCTCGAGTCTGGTGGAGGCTTAGTGCAGCCTGGAGGGTCCCTAAGACTCTCCTG |
| | I2C HL | | | TGCAGCCTCAGGATTCACTTTCAGTGACTTTTTCATGGCCTGGGTCCGCCAGGCTCCAGGGAAGG |
| | | | | GGCTGGAGTGGGTCGCAACCATTGTTTCTGATGGTGGTAGCACTTACTATCGCGACTCCGTGAAG |
| | | | | GGCCGTTTCACTATCTCCAGAGATAATGCAAAAAACACCCTGTACCTGCAAATGGACAGTCTGAG |
| | | | | GGCTGAGGACACGGCCGTTTATTACTGTGCAAAACGCGGCAATTCGGGGTACTATGTTATGGATG |
| | | | | CCTGGGGTCAAGGAACTACGGTCACCGTCTCCTCAGGTGGTGGTGGTTCTGGCGGCGGCGGCTCC |
| | | | | GGTGGTGGTGGTTCTGACATCCAGATGACTCAGTCTCCATCAACCCTGGCTGCATCTGCGGGGGA |
| | | | | GAAAGTCACCATCACCTGCCGTGCCAGCTCCAGTGTGACTTACATGCACTGGTACCAGCAGAAGC |
| | | | | CAGGCAAAGCCCCTAAATTATTGATTTATGACACATCCAAAGTGGCTTCTGGAGTCCCAAGTCGC |
| | | | | TTCAGTGGCAGTGGGTCTGGGACCGCATTTACTCTCACAATCAGCTCCGTGCAGACTGATGACTT |
| | | | | TGCCACTTATTACTGTCAGCAGTGGAGTAGGAACTCACCCTACACGTTTGGACAGGGGACCAAGC |
| | | | | TGGAAATCAAATCCGGAGGTGGTGGATCCGAGGTGCAGCTGGTCGAGTCTGGAGGAGGATTGGTG |
| | | | | CAGCCTGGAGGGTCATTGAAACTCTCATGTGCAGCCTCTGGATTCACCTTCAATAAGTACGCCAT |
| | | | | GAACTGGGTCCGCCAGGCTCCAGGAAAGGGTTTGGAATGGGTTGCTCGCATAAGAAGTAAATATA |
| | | | | ATAATTATGCAACATATTATGCCGATTCAGTGAAAGACAGGTTCACCATCTCCAGAGATGATTCA |
| | | | | AAAAACACTGCCTATCTACAAATGAACAACTTGAAAACTGAGGACACTGCCGTGTACTACTGTGT |
| | | | | GAGACATGGGAACTTCGGTAATAGCTACATATCCTACTGGGCTTACTGGGGCCAAGGGACTCTGG |
| | | | | TCACCGTCTCCTCAGGTGGTGGTGGTTCTGGCGGCGGCGGCTCCGGTGGTGGTGGTTCTCAGACT |
| | | | | GTTGTGACTCAGGAACCTTCACTCACCGTATCACCTGGTGGAACAGTCACACTCACTTGTGGCTC |
| | | | | CTCGACTGGGGCTGTTACATCTGGCAACTACCCAAACTGGGTCCAACAAAAACCAGGTCAGGCAC |
| | | | | CCCGTGGTCTAATAGGTGGGACTAAGTTCCTCGCCCCCGGTACTCCTGCCAGATTCTCAGGCTCC |
| | | | | CTGCTTGGAGGCAAGGCTGCCCTCACCCTCTCAGGGGTACAGCCAGAGGATGAGGCAGAATATTA |
| | | | | CTGTGTTCTATGGTACAGCAACCGCTGGGTGTTCGGTGGAGGAACCAAACTGACTGTCCTA |
| 611. | PM 86-A10 VL | artificial | aa | DIQMTQSPSTLSASVGDRVTITCRASSSVTYMHWYQQKPGKAPKLLIYDTSKVASGVPSRFSGSG |
| | | | | SGTEFTLTISSPQPDDFATYYCQQWSRNSPYTFGQGTKLEIK |
| 612. | PM 86-A10 VL | artificial | nt | GACATCCAGATGACTCAGTCTCCATCAACCCTGTCTGCATCTGTGGGGGACAGAGTCACCATCAC |
| | | | | CTGCCGGGCCAGCTCCAGTGTGACTTACATGCACTGGTACCAGCAGAAGCCAGGCAAAGCCCCTA |
| | | | | AATTATTGATTTATGACACATCCAAAGTGGCTTCTGGAGTCCCAAGTCGCTTCAGTGGCAGTGGG |
| | | | | TCTGGGACCGAATTTACTCTCACAATCAGCTCCCCGCAGCCTGATGACTTTGCCACTTATTACTG |
| | | | | TCAGCAGTGGAGTAGGAACTCACCCTACACGTTTGGGCAGGGGACCAAGCTGGAAATCAAA |
| 613. | PM 86-A10 | artificial | aa | RASSSVTYMH |
| | LCDR1 | | | |
| 614. | PM 86-A10 | artificial | aa | DTSKVAS |
| | LCDR2 | | | |
| 615. | PM 86-A10 | artificial | aa | QQWSRNSPYT |
| | LCDR3 | | | |
| 616. | PM 86-A10 VH | artificial | aa | EVQLLESDGGLVQPGGSLKLSCAASGFTFSDFFMAWVRQAPGKGLEWVATIVSDGGSTYYRDSVK |
| | | | | GRFTISRDNSKNTLYLQMNNLRSEDTAVYYCAKRGNSGYYVMDAWGQGTTVTVSS |
| 617. | PM 86-A10 VH | artificial | nt | GAGGTGCAGCTGCTCGAGTCTGATGGAGGCTTAGTGCAGCCTGGAGGGTCCCTAAAACTCTCCTG |
| | | | | TGCAGCCTCAGGATTCACTTTCAGTGACTTTTTCATGGCCTGGGTCCGCCAGGCTCCAGGGAAGG |
| | | | | GGCTGGAGTGGGTCGCAACCATTGTTTCTGATGGTGGTAGCACTTACTATCGCGACTCCGTGAAG |
| | | | | GGCCGTTTCACTATCTCCAGAGATAATTCAAAAAACACCCTGTACCTGCAAATGAACAATCTGAG |
| | | | | GTCTGAGGACACGGCCGTTTATTACTGTGCAAAACGCGGCAATTCGGGGTACTATGTTATGGATG |
| | | | | CCTGGGGTCAAGGAACTACGGTCACCGTCTCCTCA |
| 618. | PM 86-A10 | artificial | aa | DFFMA |
| | HCDR1 | | | |
| 619. | PM 86-A10 | artificial | aa | TIVSDGGSTYYRDSVKG |
| | HCDR2 | | | |
| 620. | PM 86-A10 | artificial | aa | RGNSGYYVMDA |
| | HCDR3 | | | |
| 621. | PM 86-A10 HL | artificial | aa | EVQLLESDGGLVQPGGSLKLSCAASGFTFSDFFMAWVRQAPGKGLEWVATIVSDGGSTYYRDSVK |
| | | | | GRFTISRDNSKNTLYLQMNNLRSEDTAVYYCAKRGNSGYYVMDAWGQGTTVTVSSGGGGSGGGGS |
| | | | | GGGGSDIQMTQSPSTLSASVGDRVTITCRASSSVTYMHWYQQKPGKAPKLLIYDTSKVASGVPSR |
| | | | | FSGSGSGTEFTLTISSPQPDDFATYYCQQWSRNSPYTFGQGTKLEIK |
| 622. | PM 86-A10 HL | artificial | nt | GAGGTGCAGCTGCTCGAGTCTGATGGAGGCTTAGTGCAGCCTGGAGGGTCCCTAAAACTCTCCTG |
| | | | | TGCAGCCTCAGGATTCACTTTCAGTGACTTTTTCATGGCCTGGGTCCGCCAGGCTCCAGGGAAGG |
| | | | | GGCTGGAGTGGGTCGCAACCATTGTTTCTGATGGTGGTAGCACTTACTATCGCGACTCCGTGAAG |
| | | | | GGCCGTTTCACTATCTCCAGAGATAATTCAAAAAACACCCTGTACCTGCAAATGAACAATCTGAG |
| | | | | GTCTGAGGACACGGCCGTTTATTACTGTGCAAAACGCGGCAATTCGGGGTACTATGTTATGGATG |
| | | | | CCTGGGGTCAAGGAACTACGGTCACCGTCTCCTCAGGTGGTGGTGGTTCTGGCGGCGGCGGCTCC |
| | | | | GGTGGTGGTGGTTCTGACATCCAGATGACTCAGTCTCCATCAACCCTGTCTGCATCTGTGGGGGA |
| | | | | CAGAGTCACCATCACCTGCCGGGCCAGCTCCAGTGTGACTTACATGCACTGGTACCAGCAGAAGC |
| | | | | CAGGCAAAGCCCCTAAATTATTGATTTATGACACATCCAAAGTGGCTTCTGGAGTCCCAAGTCGC |
| | | | | TTCAGTGGCAGTGGGTCTGGGACCGAATTTACTCTCACAATCAGCTCCCCGCAGCCTGATGACTT |
| | | | | TGCCACTTATTACTGTCAGCAGTGGAGTAGGAACTCACCCTACACGTTTGGGCAGGGGACCAAGC |
| | | | | TGGAAATCAAA |
| 623. | PM 86-A10 | artificial | aa | EVQLLESDGGLVQPGGSLKLSCAASGFTFSDFFMAWVRQAPGKGLEWVATIVSDGGSTYYRDSVK |
| | HL x I2C HL | | | GRFTISRDNSKNTLYLQMNNLRSEDTAVYYCAKRGNSGYYVMDAWGQGTTVTVSSGGGGSGGGGS |
| | | | | GGGGSDIQMTQSPSTLSASVGDRVTITCRASSSVTYMHWYQQKPGKAPKLLIYDTSKVASGVPSR |
| | | | | FSGSGSGTEFTLTISSPQPDDFATYYCQQWSRNSPYTFGQGTKLEIKSGGGGSEVQLVESGGGLV |
| | | | | QPGGSLKLSCAASGFTFNKYAMNWVRQAPGKGLEWVARIRSKYNNYATYYADSVKDRFTISRDDS |
| | | | | KNTAYLQMNNLKTEDTAVYYCVRHGNFGNSYISYWAYWGQGTLVTVSSGGGGSGGGGSGGGGSQT |
| | | | | VVTQEPSLTVSPGGTVTLTCGSSTGAVTSGNYPNWVQQKPGQAPRGLIGGTKFLAPGTPARFSGS |
| | | | | LLGGKAALTLSGVQPEDEAEYYCVLWYSNRWVFGGGTKLTVL |
| 624. | PM 86-A10 | artificial | nt | GAGGTGCAGCTGCTCGAGTCTGATGGAGGCTTAGTGCAGCCTGGAGGGTCCCTAAAACTCTCCTG |
| | HL x I2C HL | | | TGCAGCCTCAGGATTCACTTTCAGTGACTTTTTCATGGCCTGGGTCCGCCAGGCTCCAGGGAAGG |
| | | | | GGCTGGAGTGGGTCGCAACCATTGTTTCTGATGGTGGTAGCACTTACTATCGCGACTCCGTGAAG |
| | | | | GGCCGTTTCACTATCTCCAGAGATAATTCAAAAAACACCCTGTACCTGCAAATGAACAATCTGAG |
| | | | | GTCTGAGGACACGGCCGTTTATTACTGTGCAAAACGCGGCAATTCGGGGTACTATGTTATGGATG |
| | | | | CCTGGGGTCAAGGAACTACGGTCACCGTCTCCTCAGGTGGTGGTGGTTCTGGCGGCGGCGGCTCC |
| | | | | GGTGGTGGTGGTTCTGACATCCAGATGACTCAGTCTCCATCAACCCTGTCTGCATCTGTGGGGGA |
| | | | | CAGAGTCACCATCACCTGCCGGGCCAGCTCCAGTGTGACTTACATGCACTGGTACCAGCAGAAGC |
| | | | | CAGGCAAAGCCCCTAAATTATTGATTTATGACACATCCAAAGTGGCTTCTGGAGTCCCAAGTCGC |
| | | | | TTCAGTGGCAGTGGGTCTGGGACCGAATTTACTCTCACAATCAGCTCCCCGCAGCCTGATGACTT |
| | | | | TGCCACTTATTACTGTCAGCAGTGGAGTAGGAACTCACCCTACACGTTTGGGCAGGGGACCAAGC |
| | | | | TGGAAATCAAATCCGGAGGTGGTGGATCCGAGGTGCAGCTGGTCGAGTCTGGAGGAGGATTGGTG |
| | | | | CAGCCTGGAGGGTCATTGAAACTCTCATGTGCAGCCTCTGGATTCACCTTCAATAAGTACGCCAT |
| | | | | GAACTGGGTCCGCCAGGCTCCAGGAAAGGGTTTGGAATGGGTTGCTCGCATAAGAAGTAAATATA |
| | | | | ATAATTATGCAACATATTATGCCGATTCAGTGAAAGACAGGTTCACCATCTCCAGAGATGATTCA |
| | | | | AAAAACACTGCCTATCTACAAATGAACAACTTGAAAACTGAGGACACTGCCGTGTACTACTGTGT |
| | | | | GAGACATGGGAACTTCGGTAATAGCTACATATCCTACTGGGCTTACTGGGGCCAAGGGACTCTGG |
| | | | | TCACCGTCTCCTCAGGTGGTGGTGGTTCTGGCGGCGGCGGCTCCGGTGGTGGTGGTTCTCAGACT |
| | | | | GTTGTGACTCAGGAACCTTCACTCACCGTATCACCTGGTGGAACAGTCACACTCACTTGTGGCTC |
| | | | | CTCGACTGGGGCTGTTACATCTGGCAACTACCCAAACTGGGTCCAACAAAAACCAGGTCAGGCAC |
| | | | | CCCGTGGTCTAATAGGTGGGACTAAGTTCCTCGCCCCCGGTACTCCTGCCAGATTCTCAGGCTCC |
| | | | | CTGCTTGGAGGCAAGGCTGCCCTCACCCTCTCAGGGGTACAGCCAGAGGATGAGGCAGAATATTA |
| | | | | CTGTGTTCTATGGTACAGCAACCGCTGGGTGTTCGGTGGAGGAACCAAACTGACTGTCCTA |
| 625. | PM 86-B4-2 VL | artificial | aa | DIQMTQSPSTLAASPGDRVTITCRASSSVTYMHWYQQKPGKSPKLLIYDTSKVASGVPNRFSGSG |
| | | | | SGTEFTLTISSLQPDDIATYYCQQWSRNSPYTFGQGTKLEIK |
| 626. | PM 86-B4-2 VL | artificial | nt | GACATCCAGATGACTCAGTCTCCATCAACCCTGGCTGCATCTCCGGGGGACAGAGTCACCATCAC |
| | | | | CTGCCGTGCCAGCTCCAGTGTGACTTACATGCACTGGTACCAGCAGAAGCCAGGCAAATCCCCTA |
| | | | | AATTATTGATTTATGACACATCCAAAGTGGCTTCTGGAGTCCCAAATCGCTTCAGTGGCAGTGGG |
| | | | | TCTGGGACCGAATTTACTCTCACAATCAGCTCCCTGCAGCCTGATGACATTGCCACTTATTACTG |
| | | | | TCAGCAGTGGAGTAGGAACTCACCCTACACGTTTGGACAGGGGACCAAGCTGGAAATCAAA |
| 627. | PM 86-B4-2 | artificial | aa | RASSSVTYMH |
| | LCDR1 | | | |
| 628. | PM 86-B4-2 | artificial | aa | DTSKVAS |
| | LCDR2 | | | |
| 629. | PM 86-B4-2 | artificial | aa | QQWSRNSPYT |
| | LCDR3 | | | |
| 630. | PM 86-B4-2 VH | artificial | aa | EVQLLESDGGLVQPGGSLRLSCAASGFTFSDFFMAWVRQAPGKGLEWVATIVSDGGSTYYRDSVK |
| | | | | GRFTISRDNSKNTLYLQMNSLRAEDTAVYYCAKRGNSGYYVMDAWGQGTTVTVSS |
| 631. | PM 86-B4-2 VH | artificial | nt | GAGGTGCAGCTGCTCGAGTCTGATGGAGGCTTAGTGCAGCCTGGAGGGTCCCTAAGACTCTCCTG |
| | | | | TGCAGCCTCAGGATTCACTTTCAGTGACTTTTTCATGGCCTGGGTCCGCCAGGCTCCAGGGAAGG |
| | | | | GGCTGGAGTGGGTCGCAACCATTGTTTCTGATGGTGGTAGCACTTACTATCGCGACTCCGTGAAG |
| | | | | GGCCGTTTCACTATCTCCAGAGATAATTCAAAAAACACCCTGTACCTGCAAATGAACAGTCTGAG |
| | | | | GGCTGAGGACACGGCCGTTTATTACTGTGCAAAACGCGGCAATTCGGGGTACTATGTTATGGATG |
| | | | | CCTGGGGTCAAGGAACTACGGTCACCGTCTCCTCA |
| 632. | PM 86-B4-2 | artificial | aa | DFFMA |
| | HCDR1 | | | |
| 633. | PM 86-B4-2 | artificial | aa | TIVSDGGSTYYRDSVKG |
| | HCDR2 | | | |
| 634. | PM 86-B4-2 | artificial | aa | RGNSGYYVMDA |
| | HCDR3 | | | |
| 635. | PM 86-B4-2 HL | artificial | aa | EVQLLESDGGLVQPGGSLRLSCAASGFTFSDFFMAWVRQAPGKGLEWVATIVSDGGSTYYRDSVK |
| | | | | GRFTISRDNSKNTLYLQMNSLRAEDTAVYYCAKRGNSGYYVMDAWGQGTTVTVSSGGGGSGGGGS |
| | | | | GGGGSDIQMTQSPSTLAASPGDRVTITCRASSSVTYMHWYQQKPGKSPKLLIYDTSKVASGVPNR |
| | | | | FSGSGSGTEFTLTISSLQPDDIATYYCQQWSRNSPYTFGQGTKLEIK |
| 636. | PM 86-B4-2 HL | artificial | nt | GAGGTGCAGCTGCTCGAGTCTGATGGAGGCTTAGTGCAGCCTGGAGGGTCCCTAAGACTCTCCTG |
| | | | | TGCAGCCTCAGGATTCACTTTCAGTGACTTTTTCATGGCCTGGGTCCGCCAGGCTCCAGGGAAGG |
| | | | | GGCTGGAGTGGGTCGCAACCATTGTTTCTGATGGTGGTAGCACTTACTATCGCGACTCCGTGAAG |
| | | | | GGCCGTTTCACTATCTCCAGAGATAATTCAAAAAACACCCTGTACCTGCAAATGAACAGTCTGAG |
| | | | | GGCTGAGGACACGGCCGTTTATTACTGTGCAAAACGCGGCAATTCGGGGTACTATGTTATGGATG |
| | | | | CCTGGGGTCAAGGAACTACGGTCACCGTCTCCTCAGGTGGTGGTGGTTCTGGCGGCGGCGGCTCC |
| | | | | GGTGGTGGTGGTTCTGACATCCAGATGACTCAGTCTCCATCAACCCTGGCTGCATCTCCGGGGGA |
| | | | | CAGAGTCACCATCACCTGCCGTGCCAGCTCCAGTGTGACTTACATGCACTGGTACCAGCAGAAGC |
| | | | | CAGGCAAATCCCCTAAATTATTGATTTATGACACATCCAAAGTGGCTTCTGGAGTCCCAAATCGC |
| | | | | TTCAGTGGCAGTGGGTCTGGGACCGAATTTACTCTCACAATCAGCTCCCTGCAGCCTGATGACAT |
| | | | | TGCCACTTATTACTGTCAGCAGTGGAGTAGGAACTCACCCTACACGTTTGGACAGGGGACCAAGC |
| | | | | TGGAAATCAAA |
| 637. | PM 86-B4-2 | artificial | aa | EVQLLESDGGLVQPGGSLRLSCAASGFTFSDFFMAWVRQAPGKGLEWVATIVSDGGSTYYRDSVK |
| | HL x I2C HL | | | GRFTISRDNSKNTLYLQMNSLRAEDTAVYYCAKRGNSGYYVMDAWGQGTTVTVSSGGGGSGGGGS |
| | | | | GGGGSDIQMTQSPSTLAASPGDRVTITCRASSSVTYMHWYQQKPGKSPKLLIYDTSKVASGVPNR |
| | | | | FSGSGSGTEFTLTISSLQPDDIATYYCQQWSRNSPYTFGQGTKLEIKSGGGGSEVQLVESGGGLV |
| | | | | QPGGSLKLSCAASGFTFNKYAMNWVRQAPGKGLEWVARIRSKYNNYATYYADSVKDRFTISRDDS |
| | | | | KNTAYLQMNNLKTEDTAVYYCVRHGNFGNSYISYWAYWGQGTLVTVSSGGGGSGGGGSGGGGSQT |
| | | | | VVTQEPSLTVSPGGTVTLTCGSSTGAVTSGNYPNWVQQKPGQAPRGLIGGTKFLAPGTPARFSGS |
| | | | | LLGGKAALTLSGVQPEDEAEYYCVLWYSNRWVFGGGTKLTVL |
| 638. | PM 86-B4-2 | artificial | nt | GAGGTGCAGCTGCTCGAGTCTGATGGAGGCTTAGTGCAGCCTGGAGGGTCCCTAAGACTCTCCTG |
| | HL x I2C HL | | | TGCAGCCTCAGGATTCACTTTCAGTGACTTTTTCATGGCCTGGGTCCGCCAGGCTCCAGGGAAGG |
| | | | | GGCTGGAGTGGGTCGCAACCATTGTTTCTGATGGTGGTAGCACTTACTATCGCGACTCCGTGAAG |
| | | | | GGCCGTTTCACTATCTCCAGAGATAATTCAAAAAACACCCTGTACCTGCAAATGAACAGTCTGAG |
| | | | | GGCTGAGGACACGGCCGTTTATTACTGTGCAAAACGCGGCAATTCGGGGTACTATGTTATGGATG |
| | | | | CCTGGGGTCAAGGAACTACGGTCACCGTCTCCTCAGGTGGTGGTGGTTCTGGCGGCGGCGGCTCC |
| | | | | GGTGGTGGTGGTTCTGACATCCAGATGACTCAGTCTCCATCAACCCTGGCTGCATCTCCGGGGGA |
| | | | | CAGAGTCACCATCACCTGCCGTGCCAGCTCCAGTGTGACTTACATGCACTGGTACCAGCAGAAGC |
| | | | | CAGGCAAATCCCCTAAATTATTGATTTATGACACATCCAAAGTGGCTTCTGGAGTCCCAAATCGC |
| | | | | TTCAGTGGCAGTGGGTCTGGGACCGAATTTACTCTCACAATCAGCTCCCTGCAGCCTGATGACAT |
| | | | | TGCCACTTATTACTGTCAGCAGTGGAGTAGGAACTCACCCTACACGTTTGGACAGGGGACCAAGC |
| | | | | TGGAAATCAAATCCGGAGGTGGTGGATCCGAGGTGCAGCTGGTCGAGTCTGGAGGAGGATTGGTG |
| | | | | CAGCCTGGAGGGTCATTGAAACTCTCATGTGCAGCCTCTGGATTCACCTTCAATAAGTACGCCAT |
| | | | | GAACTGGGTCCGCCAGGCTCCAGGAAAGGGTTTGGAATGGGTTGCTCGCATAAGAAGTAAATATA |
| | | | | ATAATTATGCAACATATTATGCCGATTCAGTGAAAGACAGGTTCACCATCTCCAGAGATGATTCA |
| | | | | AAAAACACTGCCTATCTACAAATGAACAACTTGAAAACTGAGGACACTGCCGTGTACTACTGTGT |
| | | | | GAGACATGGGAACTTCGGTAATAGCTACATATCCTACTGGGCTTACTGGGGCCAAGGGACTCTGG |
| | | | | TCACCGTCTCCTCAGGTGGTGGTGGTTCTGGCGGCGGCGGCTCCGGTGGTGGTGGTTCTCAGACT |
| | | | | GTTGTGACTCAGGAACCTTCACTCACCGTATCACCTGGTGGAACAGTCACACTCACTTGTGGCTC |
| | | | | CTCGACTGGGGCTGTTACATCTGGCAACTACCCAAACTGGGTCCAACAAAAACCAGGTCAGGCAC |
| | | | | CCCGTGGTCTAATAGGTGGGACTAAGTTCCTCGCCCCCGGTACTCCTGCCAGATTCTCAGGCTCC |
| | | | | CTGCTTGGAGGCAAGGCTGCCCTCACCCTCTCAGGGGTACAGCCAGAGGATGAGGCAGAATATTA |
| | | | | CTGTGTTCTATGGTACAGCAACCGCTGGGTGTTCGGTGGAGGAACCAAACTGACTGTCCTA |
| 639. | PM 98-B4 VL | artificial | aa | DIQMTQSPSTLSASVGEKVTITCRASSSVTYMHWYQQKPGKSPKLLIYDTSKVASGVPSRFSGSG |
| | | | | SGTAYTLTISSLQTDDFATYYCQQWSRNSPYTFGQGTKLEIK |
| 640. | PM 98-B4 VL | artificial | nt | GACATCCAGATGACTCAGTCTCCATCAACCCTGTCTGCATCTGTGGGGGAGAAAGTCACCATCAC |
| | | | | CTGCCGTGCCAGCTCCAGTGTGACTTACATGCACTGGTACCAGCAGAAGCCAGGCAAATCCCCTA |
| | | | | AATTATTGATTTATGACACATCCAAAGTGGCTTCTGGAGTCCCAAGTCGCTTCAGTGGCAGTGGG |
| | | | | TCTGGGACCGCATATACTCTCACAATCAGCTCCCTGCAGACTGATGACTTTGCCACTTATTACTG |
| | | | | TCAGCAGTGGAGTAGGAACTCACCCTACACGTTTGGACAGGGGACCAAGCTGGAAATCAAA |
| 641. | PM 98-B4 | artificial | aa | RASSSVTYMH |
| | LCDR1 | | | |
| 642. | PM 98-B4 | artificial | aa | DTSKVAS |
| | LCDR2 | | | |
| 643. | PM 98-B4 | artificial | aa | QQWSRNSPYT |
| | LCDR3 | | | |
| 644. | PM 98-B4 VH | artificial | aa | EVQLLESGGGLVQPGGSLRLSCAASGFTFSDFFMAWIRQAPGKGLEWVSTIVSDGGSTYYRDSVK |
| | | | | GRFTISRDNSQSTLYLQMDSLTAEDTAVYYCAKRGNSGYYVMDAWGQGTTVTVSS |
| 645. | PM 98-B4 VH | artificial | nt | GAGGTGCAGCTGCTCGAGTCTGGTGGAGGCTTAGTGCAGCCTGGAGGGTCCCTAAGACTCTCCTG |
| | | | | TGCAGCCTCAGGATTCACTTTCAGTGACTTTTTCATGGCCTGGATCCGCCAGGCTCCAGGGAAGG |
| | | | | GGCTGGAGTGGGTCTCAACCATTGTTTCTGATGGTGGTAGCACTTACTATCGCGACTCCGTGAAG |
| | | | | GGCCGTTTCACTATCTCCAGAGATAATTCACAAAGCACCCTGTACCTGCAAATGGACAGTCTGAC |
| | | | | GGCTGAGGACACGGCCGTTTATTACTGTGCAAAACGCGGCAATTCGGGGTACTATGTTATGGATG |
| | | | | CCTGGGGTCAAGGAACTACGGTCACCGTCTCCTCA |
| 646. | PM 98-B4 | artificial | aa | DFFMA |
| | HCDR1 | | | |
| 647. | PM 98-B4 | artificial | aa | TIVSDGGSTYYRDSVKG |
| | HCDR2 | | | |
| 648. | PM 98-B4 | artificial | aa | RGNSGYYVMDA |
| | HCDR3 | | | |
| 649. | PM 98-B4 HL | artificial | aa | EVQLLESGGGLVQPGGSLRLSCAASGFTFSDFFMAWIRQAPGKGLEWVSTIVSDGGSTYYRDSVK |
| | | | | GRFTISRDNSQSTLYLQMDSLTAEDTAVYYCAKRGNSGYYVMDAWGQGTTVTVSSGGGGSGGGGS |
| | | | | GGGGSDIQMTQSPSTLSASVGEKVTITCRASSSVTYMHWYQQKPGKSPKLLIYDTSKVASGVPSR |
| | | | | FSGSGSGTAYTLTISSLQTDDFATYYCQQWSRNSPYTFGQGTKLEIK |
| 650. | PM 98-B4 HL | artificial | nt | GAGGTGCAGCTGCTCGAGTCTGGTGGAGGCTTAGTGCAGCCTGGAGGGTCCCTAAGACTCTCCTG |
| | | | | TGCAGCCTCAGGATTCACTTTCAGTGACTTTTTCATGGCCTGGATCCGCCAGGCTCCAGGGAAGG |
| | | | | GGCTGGAGTGGGTCTCAACCATTGTTTCTGATGGTGGTAGCACTTACTATCGCGACTCCGTGAAG |
| | | | | GGCCGTTTCACTATCTCCAGAGATAATTCACAAAGCACCCTGTACCTGCAAATGGACAGTCTGAC |
| | | | | GGCTGAGGACACGGCCGTTTATTACTGTGCAAAACGCGGCAATTCGGGGTACTATGTTATGGATG |
| | | | | CCTGGGGTCAAGGAACTACGGTCACCGTCTCCTCAGGTGGTGGTGGTTCTGGCGGCGGCGGCTCC |
| | | | | GGTGGTGGTGGTTCTGACATCCAGATGACTCAGTCTCCATCAACCCTGTCTGCATCTGTGGGGGA |
| | | | | GAAAGTCACCATCACCTGCCGTGCCAGCTCCAGTGTGACTTACATGCACTGGTACCAGCAGAAGC |
| | | | | CAGGCAAATCCCCTAAATTATTGATTTATGACACATCCAAAGTGGCTTCTGGAGTCCCAAGTCGC |
| | | | | TTCAGTGGCAGTGGGTCTGGGACCGCATATACTCTCACAATCAGCTCCCTGCAGACTGATGACTT |
| | | | | TGCCACTTATTACTGTCAGCAGTGGAGTAGGAACTCACCCTACACGTTTGGACAGGGGACCAAGC |
| | | | | TGGAAATCAAA |
| 651. | PM 98-B4 | artificial | aa | EVQLLESGGGLVQPGGSLRLSCAASGFTFSDFFMAWIRQAPGKGLEWVSTIVSDGGSTYYRDSVK |
| | HL x I2C HL | | | GRFTISRDNSQSTLYLQMDSLTAEDTAVYYCAKRGNSGYYVMDAWGQGTTVTVSSGGGGSGGGGS |
| | | | | GGGGSDIQMTQSPSTLSASVGEKVTITCRASSSVTYMHWYQQKPGKSPKLLIYDTSKVASGVPSR |
| | | | | FSGSGSGTAYTLTISSLQTDDFATYYCQQWSRNSPYTFGQGTKLEIKSGGGGSEVQLVESGGGLV |
| | | | | QPGGSLKLSCAASGFTFNKYAMNWVRQAPGKGLEWVARIRSKYNNYATYYADSVKDRFTISRDDS |
| | | | | KNTAYLQMNNLKTEDTAVYYCVRHGNFGNSYISYWAYWGQGTLVTVSSGGGGSGGGGSGGGGSQT |
| | | | | VVTQEPSLTVSPGGTVTLTCGSSTGAVTSGNYPNWVQQKPGQAPRGLIGGTKFLAPGTPARFSGS |
| | | | | LLGGKAALTLSGVQPEDEAEYYCVLWYSNRWVFGGGTKLTVL |
| 652. | PM 98-B4 | artificial | nt | GAGGTGCAGCTGCTCGAGTCTGGTGGAGGCTTAGTGCAGCCTGGAGGGTCCCTAAGACTCTCCTG |
| | HL x I2C HL | | | TGCAGCCTCAGGATTCACTTTCAGTGACTTTTTCATGGCCTGGATCCGCCAGGCTCCAGGGAAGG |
| | | | | GGCTGGAGTGGGTCTCAACCATTGTTTCTGATGGTGGTAGCACTTACTATCGCGACTCCGTGAAG |
| | | | | GGCCGTTTCACTATCTCCAGAGATAATTCACAAAGCACCCTGTACCTGCAAATGGACAGTCTGAC |
| | | | | GGCTGAGGACACGGCCGTTTATTACTGTGCAAAACGCGGCAATTCGGGGTACTATGTTATGGATG |
| | | | | CCTGGGGTCAAGGAACTACGGTCACCGTCTCCTCAGGTGGTGGTGGTTCTGGCGGCGGCGGCTCC |
| | | | | GGTGGTGGTGGTTCTGACATCCAGATGACTCAGTCTCCATCAACCCTGTCTGCATCTGTGGGGGA |
| | | | | GAAAGTCACCATCACCTGCCGTGCCAGCTCCAGTGTGACTTACATGCACTGGTACCAGCAGAAGC |
| | | | | CAGGCAAATCCCCTAAATTATTGATTTATGACACATCCAAAGTGGCTTCTGGAGTCCCAAGTCGC |
| | | | | TTCAGTGGCAGTGGGTCTGGGACCGCATATACTCTCACAATCAGCTCCCTGCAGACTGATGACTT |
| | | | | TGCCACTTATTACTGTCAGCAGTGGAGTAGGAACTCACCCTACACGTTTGGACAGGGGACCAAGC |
| | | | | TGGAAATCAAATCCGGAGGTGGTGGATCCGAGGTGCAGCTGGTCGAGTCTGGAGGAGGATTGGTG |
| | | | | CAGCCTGGAGGGTCATTGAAACTCTCATGTGCAGCCTCTGGATTCACCTTCAATAAGTACGCCAT |
| | | | | GAACTGGGTCCGCCAGGCTCCAGGAAAGGGTTTGGAATGGGTTGCTCGCATAAGAAGTAAATATA |
| | | | | ATAATTATGCAACATATTATGCCGATTCAGTGAAAGACAGGTTCACCATCTCCAGAGATGATTCA |
| | | | | AAAAACACTGCCTATCTACAAATGAACAACTTGAAAACTGAGGACACTGCCGTGTACTACTGTGT |
| | | | | GAGACATGGGAACTTCGGTAATAGCTACATATCCTACTGGGCTTACTGGGGCCAAGGGACTCTGG |
| | | | | TCACCGTCTCCTCAGGTGGTGGTGGTTCTGGCGGCGGCGGCTCCGGTGGTGGTGGTTCTCAGACT |
| | | | | GTTGTGACTCAGGAACCTTCACTCACCGTATCACCTGGTGGAACAGTCACACTCACTTGTGGCTC |
| | | | | CTCGACTGGGGCTGTTACATCTGGCAACTACCCAAACTGGGTCCAACAAAAACCAGGTCAGGCAC |
| | | | | CCCGTGGTCTAATAGGTGGGACTAAGTTCCTCGCCCCCGGTACTCCTGCCAGATTCTCAGGCTCC |
| | | | | CTGCTTGGAGGCAAGGCTGCCCTCACCCTCTCAGGGGTACAGCCAGAGGATGAGGCAGAATATTA |
| | | | | CTGTGTTCTATGGTACAGCAACCGCTGGGTGTTCGGTGGAGGAACCAAACTGACTGTCCTA |
| 653. | PM 86-C3 VL | artificial | aa | DIQMTQSPSTLAASVGDRVTITCRASSSVTYMHWYQQKPGKAPKLLIYDTSKVASGVPNRFSGSG |
| | | | | SGTEFTLTISSLQTDDSATYYCQQWSRNSPYTFGQGTKLEIK |
| 654. | PM 86-C3 VL | artificial | nt | GACATCCAGATGACTCAGTCTCCATCAACCCTGGCTGCATCTGTGGGGGACAGAGTCACCATCAC |
| | | | | CTGCCGTGCCAGCTCCAGTGTGACTTACATGCACTGGTACCAGCAGAAGCCAGGCAAAGCCCCTA |
| | | | | AATTATTGATTTATGACACATCCAAAGTGGCTTCTGGAGTCCCAAATCGCTTCAGTGGCAGTGGG |
| | | | | TCTGGGACCGAATTTACTCTCACAATCAGCTCCCTGCAGACTGATGACTCTGCCACTTATTACTG |
| | | | | TCAGCAGTGGAGTAGGAACTCACCCTACACGTTTGGACAGGGGACCAAGCTGGAAATCAAA |
| 655. | PM 86-C3 | artificial | aa | RASSSVTYMH |
| | LCDR1 | | | |
| 656. | PM 86-C3 | artificial | aa | DTSKVAS |
| | LCDR2 | | | |
| 657. | PM 86-C3 | artificial | aa | QQWSRNSPYT |
| | LCDR3 | | | |
| 658. | PM 86-C3 VH | artificial | aa | EVQLLESGGGLVQPGGSLKLSCAASGFTFSDFFMAWVRQAPGKGLEWVATIVSDGGSTYYRDSVK |
| | | | | GRFTISRDNAKNTLYLQMNSLTAEDTAIYYCAKRGNSGYYVMDAWGQGTTVTVSS |
| 659. | PM 86-C3 VH | artificial | nt | GAGGTGCAGCTGCTCGAGTCTGGTGGAGGCTTAGTGCAGCCTGGAGGGTCCCTAAAACTCTCCTG |
| | | | | TGCAGCCTCAGGATTCACTTTCAGTGACTTTTTCATGGCCTGGGTCCGCCAGGCTCCAGGGAAGG |
| | | | | GGCTGGAGTGGGTCGCAACCATTGTTTCTGATGGTGGTAGCACTTACTATCGTGACTCCGTGAAG |
| | | | | GGCCGTTTCACTATCTCCAGAGATAATGCAAAAAACACCCTGTACCTGCAAATGAACAGTCTGAC |
| | | | | GGCTGAGGACACGGCCATTTATTACTGTGCAAAACGCGGCAATTCGGGGTACTATGTTATGGATG |
| | | | | CCTGGGGTCAAGGAACTACGGTCACCGTCTCCTCA |
| 660. | PM 86-C3 | artificial | aa | DFFMA |
| | HCDR1 | | | |
| 661. | PM 86-C3 | artificial | aa | TIVSDGGSTYYRDSVKG |
| | HCDR2 | | | |
| 662. | PM 86-C3 | artificial | aa | RGNSGYYVMDA |
| | HCDR3 | | | |
| 663. | PM 86-C3 HL | artificial | aa | EVQLLESGGGLVQPGGSLKLSCAASGFTFSDFFMAWVRQAPGKGLEWVATIVSDGGSTYYRDSVK |
| | | | | GRFTISRDNAKNTLYLQMNSLTAEDTAIYYCAKRGNSGYYVMDAWGQGTTVTVSSGGGGSGGGGS |
| | | | | GGGGSDIQMTQSPSTLAASVGDRVTITCRASSSVTYMHWYQQKPGKAPKLLIYDTSKVASGVPNR |
| | | | | FSGSGSGTEFTLTISSLQTDDSATYYCQQWSRNSPYTFGQGTKLEIK |
| 664. | PM 86-C3 HL | artificial | nt | GAGGTGCAGCTGCTCGAGTCTGGTGGAGGCTTAGTGCAGCCTGGAGGGTCCCTAAAACTCTCCTG |
| | | | | TGCAGCCTCAGGATTCACTTTCAGTGACTTTTTCATGGCCTGGGTCCGCCAGGCTCCAGGGAAGG |
| | | | | GGCTGGAGTGGGTCGCAACCATTGTTTCTGATGGTGGTAGCACTTACTATCGTGACTCCGTGAAG |
| | | | | GGCCGTTTCACTATCTCCAGAGATAATGCAAAAAACACCCTGTACCTGCAAATGAACAGTCTGAC |
| | | | | GGCTGAGGACACGGCCATTTATTACTGTGCAAAACGCGGCAATTCGGGGTACTATGTTATGGATG |
| | | | | CCTGGGGTCAAGGAACTACGGTCACCGTCTCCTCAGGTGGTGGTGGTTCTGGCGGCGGCGGCTCC |
| | | | | GGTGGTGGTGGTTCTGACATCCAGATGACTCAGTCTCCATCAACCCTGGCTGCATCTGTGGGGGA |
| | | | | CAGAGTCACCATCACCTGCCGTGCCAGCTCCAGTGTGACTTACATGCACTGGTACCAGCAGAAGC |
| | | | | CAGGCAAAGCCCCTAAATTATTGATTTATGACACATCCAAAGTGGCTTCTGGAGTCCCAAATCGC |
| | | | | TTCAGTGGCAGTGGGTCTGGGACCGAATTTACTCTCACAATCAGCTCCCTGCAGACTGATGACTC |
| | | | | TGCCACTTATTACTGTCAGCAGTGGAGTAGGAACTCACCCTACACGTTTGGACAGGGGACCAAGC |
| | | | | TGGAAATCAAA |
| 665. | PM 86-C3 | artificial | aa | EVQLLESGGGLVQPGGSLKLSCAASGFTFSDFFMAWVRQAPGKGLEWVATIVSDGGSTYYRDSVK |
| | HL x I2C HL | | | GRFTISRDNAKNTLYLQMNSLTAEDTAIYYCAKRGNSGYYVMDAWGQGTTVTVSSGGGGSGGGGS |
| | | | | GGGGSDIQMTQSPSTLAASVGDRVTITCRASSSVTYMHWYQQKPGKAPKLLIYDTSKVASGVPNR |
| | | | | FSGSGSGTEFTLTISSLQTDDSATYYCQQWSRNSPYTFGQGTKLEIKSGGGGSEVQLVESGGGLV |
| | | | | QPGGSLKLSCAASGFTFNKYAMNWVRQAPGKGLEWVARIRSKYNNYATYYADSVKDRFTISRDDS |
| | | | | KNTAYLQMNNLKTEDTAVYYCVRHGNFGNSYISYWAYWGQGTLVTVSSGGGGSGGGGSGGGGSQT |
| | | | | VVTQEPSLTVSPGGTVTLTCGSSTGAVTSGNYPNWVQQKPGQAPRGLIGGTKFLAPGTPARFSGS |
| | | | | LLGGKAALTLSGVQPEDEAEYYCVLWYSNRWVFGGGTKLTVL |
| 666. | PM 86-C3 | artificial | nt | GAGGTGCAGCTGCTCGAGTCTGGTGGAGGCTTAGTGCAGCCTGGAGGGTCCCTAAAACTCTCCTG |
| | HL x I2C HL | | | TGCAGCCTCAGGATTCACTTTCAGTGACTTTTTCATGGCCTGGGTCCGCCAGGCTCCAGGGAAGG |
| | | | | GGCTGGAGTGGGTCGCAACCATTGTTTCTGATGGTGGTAGCACTTACTATCGTGACTCCGTGAAG |
| | | | | GGCCGTTTCACTATCTCCAGAGATAATGCAAAAAACACCCTGTACCTGCAAATGAACAGTCTGAC |
| | | | | GGCTGAGGACACGGCCATTTATTACTGTGCAAAACGCGGCAATTCGGGGTACTATGTTATGGATG |
| | | | | CCTGGGGTCAAGGAACTACGGTCACCGTCTCCTCAGGTGGTGGTGGTTCTGGCGGCGGCGGCTCC |
| | | | | GGTGGTGGTGGTTCTGACATCCAGATGACTCAGTCTCCATCAACCCTGGCTGCATCTGTGGGGGA |
| | | | | CAGAGTCACCATCACCTGCCGTGCCAGCTCCAGTGTGACTTACATGCACTGGTACCAGCAGAAGC |
| | | | | CAGGCAAAGCCCCTAAATTATTGATTTATGACACATCCAAAGTGGCTTCTGGAGTCCCAAATCGC |
| | | | | TTCAGTGGCAGTGGGTCTGGGACCGAATTTACTCTCACAATCAGCTCCCTGCAGACTGATGACTC |
| | | | | TGCCACTTATTACTGTCAGCAGTGGAGTAGGAACTCACCCTACACGTTTGGACAGGGGACCAAGC |
| | | | | TGGAAATCAAATCCGGAGGTGGTGGATCCGAGGTGCAGCTGGTCGAGTCTGGAGGAGGATTGGTG |
| | | | | CAGCCTGGAGGGTCATTGAAACTCTCATGTGCAGCCTCTGGATTCACCTTCAATAAGTACGCCAT |
| | | | | GAACTGGGTCCGCCAGGCTCCAGGAAAGGGTTTGGAATGGGTTGCTCGCATAAGAAGTAAATATA |
| | | | | ATAATTATGCAACATATTATGCCGATTCAGTGAAAGACAGGTTCACCATCTCCAGAGATGATTCA |
| | | | | AAAAACACTGCCTATCTACAAATGAACAACTTGAAAACTGAGGACACTGCCGTGTACTACTGTGT |
| | | | | GAGACATGGGAACTTCGGTAATAGCTACATATCCTACTGGGCTTACTGGGGCCAAGGGACTCTGG |
| | | | | TCACCGTCTCCTCAGGTGGTGGTGGTTCTGGCGGCGGCGGCTCCGGTGGTGGTGGTTCTCAGACT |
| | | | | GTTGTGACTCAGGAACCTTCACTCACCGTATCACCTGGTGGAACAGTCACACTCACTTGTGGCTC |
| | | | | CTCGACTGGGGCTGTTACATCTGGCAACTACCCAAACTGGGTCCAACAAAAACCAGGTCAGGCAC |
| | | | | CCCGTGGTCTAATAGGTGGGACTAAGTTCCTCGCCCCCGGTACTCCTGCCAGATTCTCAGGCTCC |
| | | | | CTGCTTGGAGGCAAGGCTGCCCTCACCCTCTCAGGGGTACAGCCAGAGGATGAGGCAGAATATTA |
| | | | | CTGTGTTCTATGGTACAGCAACCGCTGGGTGTTCGGTGGAGGAACCAAACTGACTGTCCTA |
| 667. | PM 86-E12 VL | artificial | aa | DIQMTQSPSTLSASAGDRVTITCRASSSVTYMHWYQQKPGTAPKLLIYDTSKVASGVPSRFSGSG |
| | | | | SGTEFTLTISSVQPEDIATYYCQQWSRNSPYTFGQGTKLEIK |
| 668. | PM 86-E12 VL | artificial | nt | GACATCCAGATGACTCAGTCTCCATCAACCCTGTCTGCATCTGCGGGGGACAGAGTCACCATCAC |
| | | | | CTGCCGTGCCAGCTCCAGTGTGACTTACATGCACTGGTACCAGCAGAAGCCAGGCACAGCCCCTA |
| | | | | AATTATTGATTTATGACACATCCAAAGTGGCTTCTGGAGTCCCAAGTCGCTTCAGTGGCAGTGGG |
| | | | | TCTGGGACCGAATTTACTCTCACAATCAGCTCCGTGCAGCCTGAAGACATTGCCACTTATTACTG |
| | | | | TCAGCAGTGGAGTAGGAACTCACCCTACACGTTTGGACAGGGGACCAAGCTGGAAATCAAA |
| 669. | PM 86-E12 | artificial | aa | RASSSVTYMH |
| | LCDR1 | | | |
| 670. | PM 86-E12 | artificial | aa | DTSKVAS |
| | LCDR2 | | | |
| 671. | PM 86-E12 | artificial | aa | QQWSRNSPYT |
| | LCDR3 | | | |
| 672. | PM 86-E12 VH | artificial | aa | EVQLLESGGGLVQPGGSLRLSCAASGFTFSDFFMAWVRQAPTKGLEWVSTIVSDGGSTYYRDSVK |
| | | | | GRFTISRDNAKNTLYLQMNSLRAEDTAVYYCARRGNSGYYVMDAWGQGTTVTVSS |
| 673. | PM 86-E12 VH | artificial | nt | GAGGTGCAGCTGCTCGAGTCTGGTGGAGGCTTAGTGCAGCCTGGAGGGTCCCTAAGACTCTCCTG |
| | | | | TGCAGCCTCAGGATTCACTTTCAGTGACTTTTTCATGGCCTGGGTCCGCCAGGCTCCAACGAAGG |
| | | | | GGCTGGAGTGGGTCTCAACCATTGTTTCTGATGGTGGTAGCACTTACTATCGCGACTCCGTGAAG |
| | | | | GGCCGTTTCACTATCTCCAGAGATAATGCAAAAAACACCCTGTACCTGCAAATGAACAGTCTGAG |
| | | | | GGCTGAGGACACGGCCGCACGTTACTGTGCAAGACGCGGCAATTCGGGGTACTATGTTATGGATG |
| | | | | CCTGGGGTCAAGGAACTACGGTCACCGTCTCCTCA |
| 674. | PM 86-E12 | artificial | aa | DFFMA |
| | HCDR1 | | | |
| 675. | PM 86-E12 | artificial | aa | TIVSDGGSTYYRDSVKG |
| | HCDR2 | | | |
| 676. | PM 86-E12 | artificial | aa | RGNSGYYVMDA |
| | HCDR3 | | | |
| 677. | PM 86-E12 HL | artificial | aa | EVQLLESGGGLVQPGGSLRLSCAASGFTFSDFFMAWVRQAPTKGLEWVSTIVSDGGSTYYRDSVK |
| | | | | GRFTISRDNAKNTLYLQMNSLRAEDTAVYYCARRGNSGYYVMDAWGQGTTVTVSSGGGGSGGGGS |
| | | | | GGGGSDIQMTQSPSTLSASAGDRVTITCRASSSVTYMHWYQQKPGTAPKLLIYDTSKVASGVPSR |
| | | | | FSGSGSGTEFTLTISSVQPEDIATYYCQQWSRNSPYTFGQGTKLEIK |
| 678. | PM 86-E12 HL | artificial | nt | GAGGTGCAGCTGCTCGAGTCTGGTGGAGGCTTAGTGCAGCCTGGAGGGTCCCTAAGACTCTCCTG |
| | | | | TGCAGCCTCAGGATTCACTTTCAGTGACTTTTTCATGGCCTGGGTCCGCCAGGCTCCAACGAAGG |
| | | | | GGCTGGAGTGGGTCTCAACCATTGTTTCTGATGGTGGTAGCACTTACTATCGCGACTCCGTGAAG |
| | | | | GGCCGTTTCACTATCTCCAGAGATAATGCAAAAAACACCCTGTACCTGCAAATGAACAGTCTGAG |
| | | | | GGCTGAGGACACGGCCGTTTATTACTGTGCAAGACGCGGCAATTCGGGGTACTATGTTATGGATG |
| | | | | CCTGGGGTCAAGGAACTACGGTCACCGTCTCCTCAGGTGGTGGTGGTTCTGGCGGCGGCGGCTCC |
| | | | | GGTGGTGGTGGTTCTGACATCCAGATGACTCAGTCTCCATCAACCCTGTCTGCATCTGCGGGGGA |
| | | | | CAGAGTCACCATCACCTGCCGTGCCAGCTCCAGTGTGACTTACATGCACTGGTACCAGCAGAAGC |
| | | | | CAGGCACAGCCCCTAAATTATTGATTTATGACACATCCAAAGTGGCTTCTGGAGTCCCAAGTCGC |
| | | | | TTCAGTGGCAGTGGGTCTGGGACCGAATTTACTCTCACAATCAGCTCCGTGCAGCCTGAAGACAT |
| | | | | TGCCACTTATTACTGTCAGCAGTGGAGTAGGAACTCACCCTACACGTTTGGACAGGGGACCAAGC |
| | | | | TGGAAATCAAA |
| 679. | PM 86-E12 | artificial | aa | EVQLLESGGGLVQPGGSLRLSCAASGFTFSDFFMAWVRQAPTKGLEWVSTIVSDGGSTYYRDSVK |
| | HL x I2C HL | | | GRFTISRDNAKNTLYLQMNSLRAEDTAVYYCARRGNSGYYVMDAWGQGTTVTVSSGGGGSGGGGS |
| | | | | GGGGSDIQMTQSPSTLSASAGDRVTITCRASSSVTYMHWYQQKPGTAPKLLIYDTSKVASGVPSR |
| | | | | FSGSGSGTEFTLTISSVQPEDIATYYCQQWSRNSPYTFGQGTKLEIKSGGGGSEVQLVESGGGLV |
| | | | | QPGGSLKLSCAASGFTFNKYAMNWVRQAPGKGLEWVARIRSKYNNYATYYADSVKDRFTISRDDS |
| | | | | KNTAYLQMNNLKTEDTAVYYCVRHGNFGNSYISYWAYWGQGTLVTVSSGGGGSGGGGSGGGGSQT |
| | | | | VVTQEPSLTVSPGGTVTLTCGSSTGAVTSGNYPNWVQQKPGQAPRGLIGGTKFLAPGTPARFSGS |
| | | | | LLGGKAALTLSGVQPEDEAEYYCVLWYSNRWVFGGGTKLTVL |
| 680. | PM 86-E12 | artificial | nt | GAGGTGCAGCTGCTCGAGTCTGGTGGAGGCTTAGTGCAGCCTGGAGGGTCCCTAAGACTCTCCTG |
| | HL x I2C HL | | | TGCAGCCTCAGGATTCACTTTCAGTGACTTTTTCATGGCCTGGGTCCGCCAGGCTCCAACGAAGG |
| | | | | GGCTGGAGTGGGTCTCAACCATTGTTTCTGATGGTGGTAGCACTTACTATCGCGACTCCGTGAAG |
| | | | | GGCCGTTTCACTATCTCCAGAGATAATGCAAAAAACACCCTGTACCTGCAAATGAACAGTCTGAG |
| | | | | GGCTGAGGACACGGCCGTTTATTACTGTGCAAGACGCGGCAATTCGGGGTACTATGTTATGGATG |
| | | | | CCTGGGGTCAAGGAACTACGGTCACCGTCTCCTCAGGTGGTGGTGGTTCTGGCGGCGGCGGCTCC |
| | | | | GGTGGTGGTGGTTCTGACATCCAGATGACTCAGTCTCCATCAACCCTGTCTGCATCTGCGGGGGA |
| | | | | CAGAGTCACCATCACCTGCCGTGCCAGCTCCAGTGTGACTTACATGCACTGGTACCAGCAGAAGC |
| | | | | CAGGCACAGCCCCTAAATTATTGATTTATGACACATCCAAAGTGGCTTCTGGAGTCCCAAGTCGC |
| | | | | TTCAGTGGCAGTGGGTCTGGGACCGAATTTACTCTCACAATCAGCTCCGTGCAGCCTGAAGACAT |
| | | | | TGCCACTTATTACTGTCAGCAGTGGAGTAGGAACTCACCCTACACGTTTGGACAGGGGACCAAGC |
| | | | | TGGAAATCAAATCCGGAGGTGGTGGATCCGAGGTGCAGCTGGTCGAGTCTGGAGGAGGATTGGTG |
| | | | | CAGCCTGGAGGGTCATTGAAACTCTCATGTGCAGCCTCTGGATTCACCTTCAATAAGTACGCCAT |
| | | | | GAACTGGGTCCGCCAGGCTCCAGGAAAGGGTTTGGAATGGGTTGCTCGCATAAGAAGTAAATATA |
| | | | | ATAATTATGCAACATATTATGCCGATTCAGTGAAAGACAGGTTCACCATCTCCAGAGATGATTCA |
| | | | | AAAAACACTGCCTATCTACAAATGAACAACTTGAAAACTGAGGACACTGCCGTGTACTACTGTGT |
| | | | | GAGACATGGGAACTTCGGTAATAGCTACATATCCTACTGGGCTTACTGGGGCCAAGGGACTCTGG |
| | | | | TCACCGTCTCCTCAGGTGGTGGTGGTTCTGGCGGCGGCGGCTCCGGTGGTGGTGGTTCTCAGACT |
| | | | | GTTGTGACTCAGGAACCTTCACTCACCGTATCACCTGGTGGAACAGTCACACTCACTTGTGGCTC |
| | | | | CTCGACTGGGGCTGTTACATCTGGCAACTACCCAAACTGGGTCCAACAAAAACCAGGTCAGGCAC |
| | | | | CCCGTGGTCTAATAGGTGGGACTAAGTTCCTCGCCCCCGGTACTCCTGCCAGATTCTCAGGCTCC |
| | | | | CTGCTTGGAGGCAAGGCTGCCCTCACCCTCTCAGGGGTACAGCCAGAGGATGAGGCAGAATATTA |
| | | | | CTGTGTTCTATGGTACAGCAACCGCTGGGTGTTCGGTGGAGGAACCAAACTGACTGTCCTA |
| 681. | PM F1-A10 VL | artificial | aa | DIQMTQSPSTLSASVGDRVTITCRASSSVTYMHWYQQKPGKAPKLLIYDTSKVASGVPSRFSGSG |
| | | | | SGTEFTLTISSLQPDDFATYYCQQWSRNSPYTFGQGTKLEIK |
| 682. | PM F1-A10 VL | artificial | nt | GACATCCAGATGACTCAGTCTCCATCAACCCTGTCTGCATCTGTGGGGGACAGAGTCACCATCAC |
| | | | | CTGCCGGGCCAGCTCCAGTGTGACTTACATGCACTGGTACCAGCAGAAGCCAGGCAAAGCCCCTA |
| | | | | AATTATTGATTTATGACACATCCAAAGTGGCTTCTGGAGTCCCAAGTCGCTTCAGTGGCAGTGGG |
| | | | | TCTGGGACCGAATTTACTCTCACAATCAGCTCCCTGCAGCCTGATGACTTTGCCACTTATTACTG |
| | | | | TCAGCAGTGGAGTAGGAACTCACCCTACACGTTTGGGCAGGGGACCAAGCTGGAAATCAAA |
| 683. | PM F1-A10 | artificial | aa | RASSSVTYMH |
| | LCDR1 | | | |
| 684. | PM F1-A10 | artificial | aa | DTSKVAS |
| | LCDR2 | | | |
| 685. | PM F1-A10 | artificial | aa | QQWSRNSPYT |
| | LCDR3 | | | |
| 686. | PM F1-A10 VH | artificial | aa | EVQLLESGGGLVQPGGSLRLSCAASGFTFSDFFMAWVRQAPGRGLEWVSTIVSDGGSTYYRDSVK |
| | | | | GRFTISRDNSKNTLYLQMNSLRAEDTAVYYCARRGNSGYYVMDAWGQGTTVTVSS |
| 687. | PM F1-A10 VH | artificial | nt | GAGGTGCAGCTGCTCGAGTCTGGTGGAGGCTTAGTGCAGCCTGGAGGGTCCCTAAGACTCTCCTG |
| | | | | TGCAGCCTCAGGATTCACTTTCAGTGACTTTTTCATGGCCTGGGTCCGCCAGGCTCCAGGGAGGG |
| | | | | GGCTGGAGTGGGTCTCAACCATTGTTTCTGATGGTGGTAGCACTTACTATCGCGACTCCGTGAAG |
| | | | | GGCCGTTTCACTATCTCCAGAGATAATTCAAAAAACACCCTGTACCTGCAAATGAACAGTCTGAG |
| | | | | GGCTGAGGACACGGCCGTTTATTACTGTGCAAGACGCGGCAATTCGGGGTACTATGTTATGGATG |
| | | | | CCTGGGGTCAAGGAACTACGGTCACCGTCTCCTCA |
| 688. | PM F1-A10 | artificial | aa | DFFMA |
| | HCDR1 | | | |
| 689. | PM F1-A10 | artificial | aa | TIVSDGGSTYYRDSVKG |
| | HCDR2 | | | |
| 690. | PM F1-A10 | artificial | aa | RGNSGYYVMDA |
| | HCDR3 | | | |
| 691. | PM F1-A10 HL | artificial | aa | EVQLLESGGGLVQPGGSLRLSCAASGFTFSDFFMAWVRQAPGRGLEWVSTIVSDGGSTYYRDSVK |
| | | | | GRFTISRDNSKNTLYLQMNSLRAEDTAVYYCARRGNSGYYVMDAWGQGTTVTVSSGGGGSGGGGS |
| | | | | GGGGSDIQMTQSPSTLSASVGDRVTITCRASSSVTYMHWYQQKPGKAPKLLIYDTSKVASGVPSR |
| | | | | FSGSGSGTEFTLTISSLQPDDFATYYCQQWSRNSPYTFGQGTKLEIK |
| 692. | PM F1-A10 HL | artificial | nt | GAGGTGCAGCTGCTCGAGTCTGGTGGAGGCTTAGTGCAGCCTGGAGGGTCCCTAAGACTCTCCTG |
| | | | | TGCAGCCTCAGGATTCACTTTCAGTGACTTTTTCATGGCCTGGGTCCGCCAGGCTCCAGGGAGGG |
| | | | | GGCTGGAGTGGGTCTCAACCATTGTTTCTGATGGTGGTAGCACTTACTATCGCGACTCCGTGAAG |
| | | | | GGCCGTTTCACTATCTCCAGAGATAATTCAAAAAACACCCTGTACCTGCAAATGAACAGTCTGAG |
| | | | | GGCTGAGGACACGGCCGTTTATTACTGTGCAAGACGCGGCAATTCGGGGTACTATGTTATGGATG |
| | | | | CCTGGGGTCAAGGAACTACGGTCACCGTCTCCTCAGGTGGTGGTGGTTCTGGCGGCGGCGGCTCC |
| | | | | GGTGGTGGTGGTTCTGACATCCAGATGACTCAGTCTCCATCAACCCTGTCTGCATCTGTGGGGGA |
| | | | | CAGAGTCACCATCACCTGCCGGGCCAGCTCCAGTGTGACTTACATGCACTGGTACCAGCAGAAGC |
| | | | | CAGGCAAAGCCCCTAAATTATTGATTTATGACACATCCAAAGTGGCTTCTGGAGTCCCAAGTCGC |
| | | | | TTCAGTGGCAGTGGGTCTGGGACCGAATTTACTCTCACAATCAGCTCCCTGCAGCCTGATGACTT |
| | | | | TGCCACTTATTACTGTCAGCAGTGGAGTAGGAACTCACCCTACACGTTTGGGCAGGGGACCAAGC |
| | | | | TGGAAATCAAA |
| 693. | PM F1-A10 | artificial | aa | EVQLLESGGGLVQPGGSLRLSCAASGFTFSDFFMAWVRQAPGRGLEWVSTIVSDGGSTYYRDSVK |
| | HL x I2C HL | | | GRFTISRDNSKNTLYLQMNSLRAEDTAVYYCARRGNSGYYVMDAWGQGTTVTVSSGGGGSGGGGS |
| | | | | GGGGSDIQMTQSPSTLSASVGDRVTITCRASSSVTYMHWYQQKPGKAPKLLIYDTSKVASGVPSR |
| | | | | FSGSGSGTEFTLTISSLQPDDFATYYCQQWSRNSPYTFGQGTKLEIKSGGGGSEVQLVESGGGLV |
| | | | | QPGGSLKLSCAASGFTFNKYAMNWVRQAPGKGLEWVARIRSKYNNYATYYADSVKDRFTISRDDS |
| | | | | KNTAYLQMNNLKTEDTAVYYCVRHGNFGNSYISYWAYWGQGTLVTVSSGGGGSGGGGSGGGGSQT |
| | | | | VVTQEPSLTVSPGGTVTLTCGSSTGAVTSGNYPNWVQQKPGQAPRGLIGGTKFLAPGTPARFSGS |
| | | | | LLGGKAALTLSGVQPEDEAEYYCVLWYSNRWVFGGGTKLTVL |
| 694. | PM F1-A10 | artificial | nt | GAGGTGCAGCTGCTCGAGTCTGGTGGAGGCTTAGTGCAGCCTGGAGGGTCCCTAAGACTCTCCTG |
| | HL x I2C HL | | | TGCAGCCTCAGGATTCACTTTCAGTGACTTTTTCATGGCCTGGGTCCGCCAGGCTCCAGGGAGGG |
| | | | | GGCTGGAGTGGGTCTCAACCATTGTTTCTGATGGTGGTAGCACTTACTATCGCGACTCCGTGAAG |
| | | | | GGCCGTTTCACTATCTCCAGAGATAATTCAAAAAACACCCTGTACCTGCAAATGAACAGTCTGAG |
| | | | | GGCTGAGGACACGGCCGTTTATTACTGTGCAAGACGCGGCAATTCGGGGTACTATGTTATGGATG |
| | | | | CCTGGGGTCAAGGAACTACGGTCACCGTCTCCTCAGGTGGTGGTGGTTCTGGCGGCGGCGGCTCC |
| | | | | GGTGGTGGTGGTTCTGACATCCAGATGACTCAGTCTCCATCAACCCTGTCTGCATCTGTGGGGGA |
| | | | | CAGAGTCACCATCACCTGCCGGGCCAGCTCCAGTGTGACTTACATGCACTGGTACCAGCAGAAGC |
| | | | | CAGGCAAAGCCCCTAAATTATTGATTTATGACACATCCAAAGTGGCTTCTGGAGTCCCAAGTCGC |
| | | | | TTCAGTGGCAGTGGGTCTGGGACCGAATTTACTCTCACAATCAGCTCCCTGCAGCCTGATGACTT |
| | | | | TGCCACTTATTACTGTCAGCAGTGGAGTAGGAACTCACCCTACACGTTTGGGCAGGGGACCAAGC |
| | | | | TGGAAATCAAATCCGGAGGTGGTGGATCCGAGGTGCAGCTGGTCGAGTCTGGAGGAGGATTGGTG |
| | | | | CAGCCTGGAGGGTCATTGAAACTCTCATGTGCAGCCTCTGGATTCACCTTCAATAAGTACGCCAT |
| | | | | GAACTGGGTCCGCCAGGCTCCAGGAAAGGGTTTGGAATGGGTTGCTCGCATAAGAAGTAAATATA |
| | | | | ATAATTATGCAACATATTATGCCGATTCAGTGAAAGACAGGTTCACCATCTCCAGAGATGATTCA |
| | | | | AAAAACACTGCCTATCTACAAATGAACAACTTGAAAACTGAGGACACTGCCGTGTACTACTGTGT |
| | | | | GAGACATGGGAACTTCGGTAATAGCTACATATCCTACTGGGCTTACTGGGGCCAAGGGACTCTGG |
| | | | | TCACCGTCTCCTCAGGTGGTGGTGGTTCTGGCGGCGGCGGCTCCGGTGGTGGTGGTTCTCAGACT |
| | | | | GTTGTGACTCAGGAACCTTCACTCACCGTATCACCTGGTGGAACAGTCACACTCACTTGTGGCTC |
| | | | | CTCGACTGGGGCTGTTACATCTGGCAACTACCCAAACTGGGTCCAACAAAAACCAGGTCAGGCAC |
| | | | | CCCGTGGTCTAATAGGTGGGACTAAGTTCCTCGCCCCCGGTACTCCTGCCAGATTCTCAGGCTCC |
| | | | | CTGCTTGGAGGCAAGGCTGCCCTCACCCTCTCAGGGGTACAGCCAGAGGATGAGGCAGAATATTA |
| | | | | CTGTGTTCTATGGTACAGCAACCGCTGGGTGTTCGGTGGAGGAACCAAACTGACTGTCCTA |
| 695. | PM 99-F1 VL | artificial | aa | DIQMTQSPSTLSASVGDRVTITCRASSSVTYMHWYQQKPGKSPKLLIYDTSKVASGVPSRFSGSG |
| | | | | SGTSFTLTISSLQPEDIATYYCQQWSRNSPYTFGQGTKLEIK |
| 696. | PM 99-F1 VL | artificial | nt | GACATCCAGATGACTCAGTCTCCATCAACCCTGTCTGCATCTGTGGGGGACAGAGTCACCATCAC |
| | | | | CTGCCGTGCCAGCTCCAGTGTGACTTACATGCACTGGTACCAGCAGAAGCCAGGCAAATCCCCTA |
| | | | | AATTATTGATTTATGACACATCCAAAGTGGCTTCTGGAGTCCCAAGTCGCTTCAGTGGCAGTGGG |
| | | | | TCTGGGACCTCATTTACTCTCACAATCAGCTCCCTGCAGCCTGAAGACATTGCCACTTATTACTG |
| | | | | TCAGCAGTGGAGTAGGAACTCACCCTACACGTTTGGACAGGGGACCAAGCTGGAAATCAAA |
| 697. | PM 99-F1 | artificial | aa | RASSSVTYMH |
| | LCDR1 | | | |
| 698. | PM 99-F1 | artificial | aa | DTSKVAS |
| | LCDR2 | | | |
| 699. | PM 99-F1 | artificial | aa | QQWSRNSPYT |
| | LCDR3 | | | |
| 700. | PM 99-F1 VH | artificial | aa | EVQLLESGGGLVQPGGSLRLSCAASGFTFSDFFMAWVRQAPGRGLEWVSTIVSDGGSTYYRDSVK |
| | | | | GRFTISRDNSKNTLYLQMNSLRAEDTAVYYCARRGNSGYYVMDAWGQGTTVTVSS |
| 701. | PM 99-F1 VH | artificial | nt | GAGGTGCAGCTGCTCGAGTCTGGTGGAGGCTTAGTGCAGCCTGGAGGGTCCCTAAGACTCTCCTG |
| | | | | TGCAGCCTCAGGATTCACTTTCAGTGACTTTTTCATGGCCTGGGTCCGCCAGGCTCCAGGGAGGG |
| | | | | GGCTGGAGTGGGTCTCAACCATTGTTTCTGATGGTGGTAGCACTTACTATCGCGACTCCGTGAAG |
| | | | | GGCCGTTTCACTATCTCCAGAGATAATTCAAAAAACACCCTGTACCTGCAAATGAACAGTCTGAG |
| | | | | GGCTGAGGACACGGCCGTTTATTACTGTGCAAGACGCGGCAATTCGGGGTACTATGTTATGGATG |
| | | | | CCTGGGGTCAAGGAACTACGGTCACCGTCTCCTCA |
| 702. | PM 99-F1 | artificial | aa | DFFMA |
| | HCDR1 | | | |
| 703. | PM 99-F1 | artificial | aa | TIVSDGGSTYYRDSVKG |
| | HCDR2 | | | |
| 704. | PM 99-F1 | artificial | aa | RGNSGYYVMDA |
| | HCDR3 | | | |
| 705. | PM 99-F1 HL | artificial | aa | EVQLLESGGGLVQPGGSLRLSCAASGFTFSDFFMAWVRQAPGRGLEWVSTIVSDGGSTYYRDSVK |
| | | | | GRFTISRDNSKNTLYLQMNSLRAEDTAVYYCARRGNSGYYVMDAWGQGTTVTVSSGGGGSGGGGS |
| | | | | GGGGSDIQMTQSPSTLSASVGDRVTITCRASSSVTYMHWYQQKPGKSPKLLTYDTSKVASGVPSR |
| | | | | FSGSGSGTSFTLTISSLQPEDIATYYCQQWSRNSPYTFGQGTKLEIK |
| 706. | PM 99-F1 HL | artificial | nt | GAGGTGCAGCTGCTCGAGTCTGGTGGAGGCTTAGTGCAGCCTGGAGGGTCCCTAAGACTCTCCTG |
| | | | | TGCAGCCTCAGGATTCACTTTCAGTGACTTTTTCATGGCCTGGGTCCGCCAGGCTCCAGGGAGGG |
| | | | | GGCTGGAGTGGGTCTCAACCATTGTTTCTGATGGTGGTAGCACTTACTATCGCGACTCCGTGAAG |
| | | | | GGCCGTTTCACTATCTCCAGAGATAATTCAAAAAACACCCTGTACCTGCAAATGAACAGTCTGAG |
| | | | | GGCTGAGGACACGGCCGTTTATTACTGTGCAAGACGCGGCAATTCGGGGTACTATGTTATGGATG |
| | | | | CCTGGGGTCAAGGAACTACGGTCACCGTCTCCTCAGGTGGTGGTGGTTCTGGCGGCGGCGGCTCC |
| | | | | GGTGGTGGCGGTTCTGACATCCAGATGACTCAGTCTCCATCAACCCTGTCTGCATCTGTGGGGGA |
| | | | | CAGAGTCACCATCACCTGCCGTGCCAGCTCCAGTGTGACTTACATGCACTGGTACCAGCAGAAGC |
| | | | | CAGGCAAATCCCCTAAATTATTGATTTATGACACATCCAAAGTGGCTTCTGGAGTCCCAAGTCGC |
| | | | | TTCAGTGGCAGTGGGTCTGGGACCTCATTTACTCTCACAATCAGCTCCCTGCAGCCTGAAGACAT |
| | | | | TGCCACTTATTACTGTCAGCAGTGGAGTAGGAACTCACCCTACACGTTTGGACAGGGGACCAAGC |
| | | | | TGGAAATCAAA |
| 707. | PM 99-F1 | artificial | aa | EVQLLESGGGLVQPGGSLRLSCAASGFTFSDFFMAWVRQAPGRGLEWVSTIVSDGGSTYYRDSVK |
| | HL x I2C HL | | | GRFTISRDNSKNTLYLQMNSLRAEDTAVYYCARRGNSGYYVMDAWGQGTTVTVSSGGGGSGGGGS |
| | | | | GGGGSDIQMTQSPSTLSASVGDRVTITCRASSSVTYMHWYQQKPGKSPKLLIYDTSKVASGVPSR |
| | | | | FSGSGSGTSFTLTISSLQPEDIATYYCQQWSRNSPYTFGQGTKLEIKSGGGGSEVQLVESGGGLV |
| | | | | QPGGSLKLSCAASGFTFNKYAMNWVRQAPGKGLEWVARIRSKYNNYATYYADSVKDRFTISRDDS |
| | | | | KNTAYLQMNNLKTEDTAVYYCVRHGNFGNSYISYWAYWGQGTLVTVSSGGGGSGGGGSGGGGSQT |
| | | | | VVTQEPSLTVSPGGTVTLTCGSSTGAVTSGNYPNWVQQKPGQAPRGLIGGTKFLAPGTPARFSGS |
| | | | | LLGGKAALTLSGVQPEDEAEYYCVLWYSNRWVFGGGTKLTVL |
| 708. | PM 99-F1 | artificial | nt | GAGGTGCAGCTGCTCGAGTCTGGTGGAGGCTTAGTGCAGCCTGGAGGGTCCCTAAGACTCTCCTG |
| | HL x I2C HL | | | TGCAGCCTCAGGATTCACTTTCAGTGACTTTTTCATGGCCTGGGTCCGCCAGGCTCCAGGGAGGG |
| | | | | GGCTGGAGTGGGTCTCAACCATTGTTTCTGATGGTGGTAGCACTTACTATCGCGACTCCGTGAAG |
| | | | | GGCCGTTTCACTATCTCCAGAGATAATTCAAAAAACACCCTGTACCTGCAAATGAACAGTCTGAG |
| | | | | GGCTGAGGACACGGCCGTTTATTACTGTGCAAGACGCGGCAATTCGGGGTACTATGTTATGGATG |
| | | | | CCTGGGGTCAAGGAACTACGGTCACCGTCTCCTCAGGTGGTGGTGGTTCTGGCGGCGGCGGCTCC |
| | | | | GGTGGTGGCGGTTCTGACATCCAGATGACTCAGTCTCCATCAACCCTGTCTGCATCTGTGGGGGA |
| | | | | CAGAGTCACCATCACCTGCCGTGCCAGCTCCAGTGTGACTTACATGCACTGGTACCAGCAGAAGC |
| | | | | CAGGCAAATCCCCTAAATTATTGATTTATGACACATCCAAAGTGGCTTCTGGAGTCCCAAGTCGC |
| | | | | TTCAGTGGCAGTGGGTCTGGGACCTCATTTACTCTCACAATCAGCTCCCTGCAGCCTGAAGACAT |
| | | | | TGCCACTTATTACTGTCAGCAGTGGAGTAGGAACTCACCCTACACGTTTGGACAGGGGACCAAGC |
| | | | | TGGAAATCAAATCCGGAGGTGGTGGATCCGAGGTGCAGCTGGTCGAGTCTGGAGGAGGATTGGTG |
| | | | | CAGCCTGGAGGGTCATTGAAACTCTCATGTGCAGCCTCTGGATTCACCTTCAATAAGTACGCCAT |
| | | | | GAACTGGGTCCGCCAGGCTCCAGGAAAGGGTTTGGAATGGGTTGCTCGCATAAGAAGTAAATATA |
| | | | | ATAATTATGCAACATATTATGCCGATTCAGTGAAAGACAGGTTCACCATCTCCAGAGATGATTCA |
| | | | | AAAAACACTGCCTATCTACAAATGAACAACTTGAAAACTGAGGACACTGCCGTGTACTACTGTGT |
| | | | | GAGACATGGGAACTTCGGTAATAGCTACATATCCTACTGGGCTTACTGGGGCCAAGGGACTCTGG |
| | | | | TCACCGTCTCCTCAGGTGGTGGTGGTTCTGGCGGCGGCGGCTCCGGTGGTGGTGGTTCTCAGACT |
| | | | | GTTGTGACTCAGGAACCTTCACTCACCGTATCACCTGGTGGAACAGTCACACTCACTTGTGGCTC |
| | | | | CTCGACTGGGGCTGTTACATCTGGCAACTACCCAAACTGGGTCCAACAAAAACCAGGTCAGGCAC |
| | | | | CCCGTGGTCTAATAGGTGGGACTAAGTTCCTCGCCCCCGGTACTCCTGCCAGATTCTCAGGCTCC |
| | | | | CTGCTTGGAGGCAAGGCTGCCCTCACCCTCTCAGGGGTACAGCCAGAGGATGAGGCAGAATATTA |
| | | | | CTGTGTTCTATGGTACAGCAACCGCTGGGTGTTCGGTGGAGGAACCAAACTGACTGTCCTA |
| 709. | PM 99-F5 VL | artificial | aa | DIQMTQSPSTLSASVGDRVTITCRASSSVTYMHWYQQKPGKSPKLLIYDTSKVASGVPSRFSGSG |
| | | | | SGTEFTLTISSLQPDDFATYYCQQWSRNSPYTFGQGTKLEIK |
| 710. | PM 99-F5 VL | artificial | nt | GACATCCAGATGACTCAGTCTCCATCAACCCTGTCTGCATCTGTGGGGGACAGAGTCACCATCAC |
| | | | | CTGCCGTGCCAGCTCCAGTGTGACTTACATGCACTGGTACCAGCAGAAGCCAGGCAAATCCCCTA |
| | | | | AATTATTGATTTATGACACATCCAAAGTGGCTTCTGGAGTCCCAAGTCGCTTCAGTGGCAGTGGG |
| | | | | TCTGGGACCGAATTTACTCTCACAATCAGCTCCCTGCAGCCTGATGACTTTGCCACTTATTACTG |
| | | | | TCAGCAGTGGAGTAGGAACTCACCCTACACGTTTGGACAGGGGACCAAGCTGGAAATCAAA |
| 711. | PM 99-F5 | artificial | aa | RASSSVTYMH |
| | LCDR1 | | | |
| 712. | PM 99-F5 | artificial | aa | DTSKVAS |
| | LCDR2 | | | |
| 713. | PM 99-F5 | artificial | aa | QQWSRNSPYT |
| | LCDR3 | | | |
| 714. | PM 99-F5 VH | artificial | aa | EVQLLESGGGLVQPGGSLKLSCAASGFTFSDFFMAWVRQAPGKGLEWVSTIVSDGGSTYYRDSVK |
| | | | | GRFTISRDNSKNTLYLQMNSLTAEDTAIYYCAKRGNSGYYVMDAWGQGTTVTVSS |
| 715. | PM 99-F5 VH | artificial | nt | GAGGTGCAGCTGCTCGAGTCTGGTGGAGGCTTAGTGCAGCCTGGAGGGTCCCTAAAACTCTCCTG |
| | | | | TGCAGCCTCAGGATTCACTTTCAGTGACTTTTTCATGGCCTGGGTCCGCCAGGCTCCAGGGAAGG |
| | | | | GGCTGGAGTGGGTCTCAACCATTGTTTCTGATGGTGGTAGCACTTACTATCGCGACTCCGTGAAG |
| | | | | GGCCGTTTCACTATCTCCAGAGATAATTCAAAAAACACCCTGTACCTGCAAATGAACAGTCTGAC |
| | | | | GGCTGAGGACACGGCCATTTATTACTGTGCAAAACGCGGCAATTCGGGGTACTATGTTATGGATG |
| | | | | CCTGGGGTCAAGGAACTACGGTCACCGTCTCCTCA |
| 716. | PM 99-F5 | artificial | aa | DFFMA |
| | HCDR1 | | | |
| 717. | PM 99-F5 | artificial | aa | TIVSDGGSTYYRDSVKG |
| | HCDR2 | | | |
| 718. | PM 99-F5 | artificial | aa | RGNSGYYVMDA |
| | HCDR3 | | | |
| 719. | PM 99-F5 HL | artificial | aa | EVQLLESGGGLVQPGGSLKLSCAASGFTFSDFFMAWVRQAPGKGLEWVSTIVSDGGSTYYRDSVK |
| | | | | GRFTISRDNSKNTLYLQMNSLTAEDTAIYYCAKRGNSGYYVMDAWGQGTTVTVSSGGGGSGGGGS |
| | | | | GGGGSDIQMTQSPSTLSASVGDRVTITCRASSSVTYMHWYQQKPGKSPKLLIYDTSKVASGVPSR |
| | | | | FSGSGSGTEFTLTISSLQPDDFATYYCQQWSRNSPYTFGQGTKLEIK |
| 720. | PM 99-F5 HL | artificial | nt | GAGGTGCAGCTGCTCGAGTCTGGTGGAGGCTTAGTGCAGCCTGGAGGGTCCCTAAAACTCTCCTG |
| | | | | TGCAGCCTCAGGATTCACTTTCAGTGACTTTTTCATGGCCTGGGTCCGCCAGGCTCCAGGGAAGG |
| | | | | GGCTGGAGTGGGTCTCAACCATTGTTTCTGATGGTGGTAGCACTTACTATCGCGACTCCGTGAAG |
| | | | | GGCCGTTTCACTATCTCCAGAGATAATTCAAAAAACACCCTGTACCTGCAAATGAACAGTCTGAC |
| | | | | GGCTGAGGACACGGCCATTTATTACTGTGCAAAACGCGGCAATTCGGGGTACTATGTTATGGATG |
| | | | | CCTGGGGTCAAGGAACTACGGTCACCGTCTCCTCAGGTGGTGGTGGTTCTGGCGGCGGCGGCTCC |
| | | | | GGTGGTGGTGGTTCTGACATCCAGATGACTCAGTCTCCATCAACCCTGTCTGCATCTGTGGGGGA |
| | | | | CAGAGTCACCATCACCTGCCGTGCCAGCTCCAGTGTGACTTACATGCACTGGTACCAGCAGAAGC |
| | | | | CAGGCAAATCCCCTAAATTATTGATTTATGACACATCCAAAGTGGCTTCTGGAGTCCCAAGTCGC |
| | | | | TTCAGTGGCAGTGGGTCTGGGACCGAATTTACTCTCACAATCAGCTCCCTGCAGCCTGATGACTT |
| | | | | TGCCACTTATTACTGTCAGCAGTGGAGTAGGAACTCACCCTACACGTTTGGACAGGGGACCAAGC |
| | | | | TGGAAATCAAA |
| 721. | PM 99-F5 | artificial | aa | EVQLLESGGGLVQPGGSLKLSCAASGFTFSDFFMAWVRQAPGKGLEWVSTIVSDGGSTYYRDSVK |
| | HL x I2C HL | | | GRFTISRDNSKNTLYLQMNSLTAEDTAIYYCAKRGNSGYYVMDAWGQGTTVTVSSGGGGSGGGGS |
| | | | | GGGGSDIQMTQSPSTLSASVGDRVTITCRASSSVTYMHWYQQKPGKSPKLLIYDTSKVASGVPSR |
| | | | | FSGSGSGTEFTLTISSLQPDDFATYYCQQWSRNSPYTFGQGTKLEIKSGGGGSEVQLVESGGGLV |
| | | | | QPGGSLKLSCAASGFTFNKYAMNWVRQAPGKGLEWVARIRSKYNNYATYYADSVKDRFTISRDDS |
| | | | | KNTAYLQMNNLKTEDTAVYYCVRHGNFGNSYISYWAYWGQGTLVTVSSGGGGSGGGGSGGGGSQT |
| | | | | VVTQEPSLTVSPGGTVTLTCGSSTGAVTSGNYPNWVQQKPGQAPRGLIGGTKFLAPGTPARFSGS |
| | | | | LLGGKAALTLSGVQPEDEAEYYCVLWYSNRWVFGGGTKLTVL |
| 722. | PM 86-F6 VL | artificial | aa | DIQMTQSPSTLSASVGEKVTITCRASSSVTYMHWYQQKPGKAPKLLIYDTSKVASGVPSRFSGSG |
| | | | | SGTEFTLTISSLEPEDFATYYCQQWSRNSPYTFGQGTKLEIK |
| 723. | PM 86-F6 VL | artificial | nt | GACATCCAGATGACTCAGTCTCCATCAACCCTGTCTGCATCTGTGGGGGAGAAAGTCACCATCAC |
| | | | | CTGCCGTGCCAGCTCCAGTGTGACTTACATGCACTGGTACCAGCAGAAGCCAGGCAAAGCCCCTA |
| | | | | AATTATTGATTTATGACACATCCAAAGTGGCTTCTGGAGTCCCAAGTCGCTTCAGTGGCAGTGGG |
| | | | | TCTGGGACCGAATTTACTCTCACAATCAGCTCCCTGGAGCCTGAAGACTTTGCCACTTATTACTG |
| | | | | TCAGCAGTGGAGTAGGAACTCACCCTACACGTTTGGACAGGGGACCAAGCTGGAAATCAAA |
| 724. | PM 86-F6 | artificial | aa | RASSSVTYMH |
| | LCDR1 | | | |
| 725. | PM 86-F6 | artificial | aa | DTSKVAS |
| | LCDR2 | | | |
| 726. | PM 86-F6 | artificial | aa | QQWSRNSPYT |
| | LCDR3 | | | |
| 727. | PM 86-F6 VH | artificial | aa | EVQLLESGGGLVQPGGSLKLSCAASGFTFSDFFMAWVRQAPGKGLEWVATIVSDGGSTYYRDSVK |
| | | | | GRFTISRDNSKNTLYLQMDSLTSEDTAIYYCARRGNSGYYVMDAWGQGTTVTVSS |
| 728. | PM 86-F6 VH | artificial | nt | GAGGTGCAGCTGCTCGAGTCTGGTGGAGGCTTAGTGCAGCCTGGAGGGTCCCTAAAACTCTCCTG |
| | | | | TGCAGCCTCAGGATTCACTTTCAGTGACTTTTTCATGGCCTGGGTCCGCCAGGCTCCAGGGAAGG |
| | | | | GGCTGGAGTGGGTCGCAACCATTGTTTCTGATGGTGGTAGCACTTACTATCGCGACTCCGTGAAG |
| | | | | GGCCGTTTCACTATTTCCAGAGATAATTCAAAAAACACCCTGTACCTGCAAATGGACAGTCTGAC |
| | | | | GTCTGAGGACACGGCCATTTATTACTGTGCAAGACGCGGCAATTCGGGGTACTATGTTATGGATG |
| | | | | CCTGGGGTCAAGGAACTACGGTCACCGTCTCCTCA |
| 729. | PM 86-F6 | artificial | aa | DFFMA |
| | HCDR1 | | | |
| 730. | PM 86-F6 | artificial | aa | TIVSDGGSTYYRDSVKG |
| | HCDR2 | | | |
| 731. | PM 86-F6 | artificial | aa | RGNSGYYVMDA |
| | HCDR3 | | | |
| 732. | PM 86-F6 HL | artificial | aa | EVQLLESGGGLVQPGGSLKLSCAASGFTFSDFFMAWVRQAPGKGLEWVATIVSDGGSTYYRDSVK |
| | | | | GRFTISRDNSKNTLYLQMDSLTSEDTAIYYCARRGNSGYYVMDAWGQGTTVTVSSGGGGSGGGGS |
| | | | | GGGGSDIQMTQSPSTLSASVGEKVTITCRASSSVTYMHWYQQKPGKAPKLLIYDTSKVASGVPSR |
| | | | | FSGSGSGTEFTLTISSLEPEDFATYYCQQWSRNSPYTFGQGTKLEIK |
| 733. | PM 86-F6 HL | artificial | nt | GAGGTGCAGCTGCTCGAGTCTGGTGGAGGCTTAGTGCAGCCTGGAGGGTCCCTAAAACTCTCCTG |
| | | | | TGCAGCCTCAGGATTCACTTTCAGTGACTTTTTCATGGCCTGGGTCCGCCAGGCTCCAGGGAAGG |
| | | | | GGCTGGAGTGGGTCGCAACCATTGTTTCTGATGGTGGTAGCACTTACTATCGCGACTCCGTGAAG |
| | | | | GGCCGTTTCACTATTTCCAGAGATAATTCAAAAAACACCCTGTACCTGCAAATGGACAGTCTGAC |
| | | | | GTCTGAGGACACGGCCATTTATTACTGTGCAAGACGCGGCAATTCGGGGTACTATGTTATGGATG |
| | | | | CCTGGGGTCAAGGAACTACGGTCACCGTCTCCTCAGGTGGTGGTGGTTCTGGCGGCGGCGGCTCC |
| | | | | GGTGGTGGTGGTTCTGACATCCAGATGACTCAGTCTCCATCAACCCTGTCTGCATCTGTGGGGGA |
| | | | | GAAAGTCACCATCACCTGCCGTGCCAGCTCCAGTGTGACTTACATGCACTGGTACCAGCAGAAGC |
| | | | | CAGGCAAAGCCCCTAAATTATTGATTTATGACACATCCAAAGTGGCTTCTGGAGTCCCAAGTCGC |
| | | | | TTCAGTGGCAGTGGGTCTGGGACCGAATTTACTCTCACAATCAGCTCCCTGGAGCCTGAAGACTT |
| | | | | TGCCACTTATTACTGTCAGCAGTGGAGTAGGAACTCACCCTACACGTTTGGACAGGGGACCAAGC |
| | | | | TGGAAATCAAA |
| 734. | PM 86-F6 | artificial | aa | EVQLLESGGGLVQPGGSLKLSCAASGFTFSDFFMAWVRQAPGKGLEWVATIVSDGGSTYYRDSVK |
| | HL x I2C HL | | | GRFTISRDNSKNTLYLQMDSLTSEDTAIYYCARRGNSGYYVMDAWGQGTTVTVSSGGGGSGGGGS |
| | | | | GGGGSDIQMTQSPSTLSASVGEKVTITCRASSSVTYMHWYQQKPGKAPKLLIYDTSKVASGVPSR |
| | | | | FSGSGSGTEFTLTISSLEPEDFATYYCQQWSRNSPYTFGQGTKLEIKSGGGGSEVQLVESGGGLV |
| | | | | QPGGSLKLSCAASGFTFNKYAMNWVRQAPGKGLEWVARIRSKYNNYATYYADSVKDRFTISRDDS |
| | | | | KNTAYLQMNNLKTEDTAVYYCVRHGNFGNSYISYWAYWGQGTLVTVSSGGGGSGGGGSGGGGSQT |
| | | | | VVTQEPSLTVSPGGTVTLTCGSSTGAVTSGNYPNWVQQKPGQAPRGLIGGTKFLAPGTPARFSGS |
| | | | | LLGGKAALTLSGVQPEDEAEYYCVLWYSNRWVFGGGTKLTVL |
| 735. | PM 86-F6 | artificial | nt | GAGGTGCAGCTGCTCGAGTCTGGTGGAGGCTTAGTGCAGCCTGGAGGGTCCCTAAAACTCTCCTG |
| | HL x I2C HL | | | TGCAGCCTCAGGATTCACTTTCAGTGACTTTTTCATGGCCTGGGTCCGCCAGGCTCCAGGGAAGG |
| | | | | GGCTGGAGTGGGTCGCAACCATTGTTTCTGATGGTGGTAGCACTTACTATCGCGACTCCGTGAAG |
| | | | | GGCCGTTTCACTATTTCCAGAGATAATTCAAAAAACACCCTGTACCTGCAAATGGACAGTCTGAC |
| | | | | GTCTGAGGACACGGCCATTTATTACTGTGCAAGACGCGGCAATTCGGGGTACTATGTTATGGATG |
| | | | | CCTGGGGTCAAGGAACTACGGTCACCGTCTCCTCAGGTGGTGGTGGTTCTGGCGGCGGCGGCTCC |
| | | | | GGTGGTGGTGGTTCTGACATCCAGATGACTCAGTCTCCATCAACCCTGTCTGCATCTGTGGGGGA |
| | | | | GAAAGTCACCATCACCTGCCGTGCCAGCTCCAGTGTGACTTACATGCACTGGTACCAGCAGAAGC |
| | | | | CAGGCAAAGCCCCTAAATTATTGATTTATGACACATCCAAAGTGGCTTCTGGAGTCCCAAGTCGC |
| | | | | TTCAGTGGCAGTGGGTCTGGGACCGAATTTACTCTCACAATCAGCTCCCTGGAGCCTGAAGACTT |
| | | | | TGCCACTTATTACTGTCAGCAGTGGAGTAGGAACTCACCCTACACGTTTGGACAGGGGACCAAGC |
| | | | | TGGAAATCAAATCCGGAGGTGGTGGATCCGAGGTGCAGCTGGTCGAGTCTGGAGGAGGATTGGTG |
| | | | | CAGCCTGGAGGGTCATTGAAACTCTCATGTGCAGCCTCTGGATTCACCTTCAATAAGTACGCCAT |
| | | | | GAACTGGGTCCGCCAGGCTCCAGGAAAGGGTTTGGAATGGGTTGCTCGCATAAGAAGTAAATATA |
| | | | | ATAATTATGCAACATATTATGCCGATTCAGTGAAAGACAGGTTCACCATCTCCAGAGATGATTCA |
| | | | | AAAAACACTGCCTATCTACAAATGAACAACTTGAAAACTGAGGACACTGCCGTGTACTACTGTGT |
| | | | | GAGACATGGGAACTTCGGTAATAGCTACATATCCTACTGGGCTTACTGGGGCCAAGGGACTCTGG |
| | | | | TCACCGTCTCCTCAGGTGGTGGTGGTTCTGGCGGCGGCGGCTCCGGTGGTGGTGGTTCTCAGACT |
| | | | | GTTGTGACTCAGGAACCTTCACTCACCGTATCACCTGGTGGAACAGTCACACTCACTTGTGGCTC |
| | | | | CTCGACTGGGGCTGTTACATCTGGCAACTACCCAAACTGGGTCCAACAAAAACCAGGTCAGGCAC |
| | | | | CCCGTGGTCTAATAGGTGGGACTAAGTTCCTCGCCCCCGGTACTCCTGCCAGATTCTCAGGCTCC |
| | | | | CTGCTTGGAGGCAAGGCTGCCCTCACCCTCTCAGGGGTACAGCCAGAGGATGAGGCAGAATATTA |
| | | | | CTGTGTTCTATGGTACAGCAACCGCTGGGTGTTCGGTGGAGGAACCAAACTGACTGTCCTA |
| 736. | PM99-F5 | artificial | nt | GAGGTGCAGCTGCTCGAGTCTGGTGGAGGCTTAGTGCAGCCTGGAGGGTCCCTAAAACTCTCCTG |
| | HL-I2C HL | | | TGCAGCCTCAGGATTCACTTTCAGTGACTTTTTCATGGCCTGGGTCCGCCAGGCTCCAGGGAAGG |
| | | | | GGCTGGAGTGGGTCTCAACCATTGTTTCTGATGGTGGTAGCACTTACTATCGCGACTCCGTGAAG |
| | | | | GGCCGTTTCACTATCTCCAGAGATAATTCAAAAAACACCCTGTACCTGCAAATGAACAGTCTGAC |
| | | | | GGCTGAGGACACGGCCATTTATTACTGTGCAAAACGCGGCAATTCGGGGTACTATGTTATGGATG |
| | | | | CCTGGGGTCAAGGAACTACGGTCACCGTCTCCTCAGGTGGTGGTGGTTCTGGCGGCGGCGGCTCC |
| | | | | GGTGGTGGTGGTTCTGACATCCAGATGACTCAGTCTCCATCAACCCTGTCTGCATCTGTGGGGGA |
| | | | | CAGAGTCACCATCACCTGCCGTGCCAGCTCCAGTGTGACTTACATGCACTGGTACCAGCAGAAGC |
| | | | | CAGGCAAATCCCCTAAATTATTGATTTATGACACATCCAAAGTGGCTTCTGGAGTCCCAAGTCGC |
| | | | | TTCAGTGGCAGTGGGTCTGGGACCGAATTTACTCTCACAATCAGCTCCCTGCAGCCTGATGACTT |
| | | | | TGCCACTTATTACTGTCAGCAGTGGAGTAGGAACTCACCCTACACGTTTGGACAGGGGACCAAGC |
| | | | | TGGAAATCAAATCCGGAGGTGGTGGATCCGAGGTGCAGCTGGTCGAGTCTGGAGGAGGATTGGTG |
| | | | | CAGCCTGGAGGGTCATTGAAACTCTCATGTGCAGCCTCTGGATTCACCTTCAATAAGTACGCCAT |
| | | | | GAACTGGGTCCGCCAGGCTCCAGGAAAGGGTTTGGAATGGGTTGCTCGCATAAGAAGTAAATATA |
| | | | | ATAATTATGCAACATATTATGCCGATTCAGTGAAAGACAGGTTCACCATCTCCAGAGATGATTCA |
| | | | | AAAAACACTGCCTATCTACAAATGAACAACTTGAAAACTGAGGACACTGCCGTGTACTACTGTGT |
| | | | | GAGACATGGGAACTTCGGTAATAGCTACATATCCTACTGGGCTTACTGGGGCCAAGGGACTCTGG |
| | | | | TCACCGTCTCCTCAGGTGGTGGTGGTTCTGGCGGCGGCGGCTCCGGTGGTGGTGGTTCTCAGACT |
| | | | | GTTGTGACTCAGGAACCTTCACTCACCGTATCACCTGGTGGAACAGTCACACTCACTTGTGGCTC |
| | | | | CTCGACTGGGGCTGTTACATCTGGCAACTACCCAAACTGGGTCCAACAAAAACCAGGTCAGGCAC |
| | | | | CCCGTGGTCTAATAGGTGGGACTAAGTTCCTCGCCCCCGGTACTCCTGCCAGATTCTCAGGCTCC |
| | | | | CTGCTTGGAGGCAAGGCTGCCCTCACCCTCTCAGGGGTACAGCCAGAGGATGAGGCAGAATATTA |
| | | | | CTGTGTTCTATGGTACAGCAACCGCTGGGTGTTCGGTGGAGGAACCAAACTGACTGTCCTA |
| 737. | 5′PM3-VH- | artificial | nt | CCG GAT CTC GAG TCT GGC GGC GGA CTG GTG AAG CCT GGC GRG TCC CTG |
| | A-XhoI | | | ARG CTG TCC TGT |
| 738. | 3′PM3-VH-B | artificial | nt | CCA GTA CAT GTA GTA GTC GGA GAA GGT GAA GCC GGA GGC GRY ACA GGA |
| | | | | CAG CYT CAG GGA |
| 739. | 5′PM3-VH-C | artificial | nt | TAC TAC ATG TAC TGG RTC CGC CAG RCC CCT GRG AAG SGG CTG GAA TGG |
| | | | | GTG KCC ATC ATC TCC GAC GGC (SEQ ID NO. 739) |
| 740. | 3′PM3-VH-D | artificial | nt | GGC GTT GTC CCG GGA GAT GGT GAA CCG GCC CTT GAT GAT GTC GGA GTA |
| | | | | GTA GGT GTA GTA GCC GCC GTC GGA GAT GAT |
| 741. | 5′PM3-VH-E | artificial | nt | TCC CGG GAC AAC GCC AAG AAC ARC CTG TAC CTG CAG ATG ARC TCC CTG |
| | | | | ARG KCC GAG GAC ACC GCC RTG TAC TAC TGC RCC CGG GGC |
| 742. | 3′PM3-VH- | artificial | nt | CGA TAC GGT GAC CAG GGT GCC CTG GCC CCA GTA ATC CAT GGC GCC GTG |
| | F-BstEII | | | TCT CAG CAG AGG GAA GCC CCG GGY GCA GTA GTA |
| 743. | 5′PM4-VH- | artificial | nt | CTT GAT CTC GAG TCT GGC GCC GAA STG RWG RAG CCT GGC GCC TCC GTG |
| | A-XhoI | | | AAG STG TCC TGC AAG GCC TCC GGC TAC |
| 744. | 3′PM4-VH-B | artificial | nt | CCA TTC CAG GCC CTG CYC AGG CSY CTG CCG CAS CCA GTT GAT GTC GAA |
| | | | | GTA GGT GAA GGT GTA GCC GGA GGC CTT |
| 745. | 5′PM4-VH-C | artificial | nt | CAG GGC CTG GAA TGG ATS GGC GGC ATC TCC CCT GGC GAC GGC AAC ACC |
| | | | | AAC TAC AAC GAG AAC TTC AAG |
| 746. | 3′PM4-VH-D | artificial | nt | AT GTA GGC GGT GGA GMT GGA CKT GTC TMT GGT CAK TGT GRC CYT GCC |
| | | | | CTT GAA GTT CTC GTT GTA |
| 747. | 5′PM4-VH-E | artificial | nt | C TCC ACC GCC TAC ATS SAG CTG TCC CGG CTG ASA TCT GAS GAC ACC GCC |
| | | | | GTG TAC TWC TGC GCC AGG GAC GGC |
| 748. | 3′PM4-VH- | artificial | nt | AGA CAC GGT CAC CGT GGT GCC CTG GCC CCA AGA GTC CAT GGC GTA GTA |
| | F-BstEII | | | AGG GAA GTT GCC GTC CCT GGC GCA |
| 749. | 5′PM8-VH- | artificial | nt | CTT GAT CTC GAG TCC GGC SCT GAG STG RWG AAG CCT GGC GCC TCC GTG |
| | A-XhoI | | | AAG RTG TCC TGC AAG GCC TCC GGC TAC |
| 750. | 3′PM8-VH-B | artificial | nt | CCA TTC CAG CMS CTG GCC GGG TKY CTG TYT CAC CCA GTG CAT CAC GTA |
| | | | | GCC GGT GAA GGT GTA GCC GGA GGC CTT GCA |
| 751. | 5′PM8-VH-C | artificial | nt | CCC GGC CAG SKG CTG GAA TGG ATS GGC TAC ATC AAC CCT TAC AAC GAC |
| | | | | GTG ACC CGG TAC AAC GGC AAG TTC AAG |
| 752. | 3′PM8-VH-D | artificial | nt | TTC CAT GTA GGC GGT GGA GGM GKA CKT GTC KCT GGT AAK GGT GRC TYT |
| | | | | GCC CTT GAA CTT GCC GTT GTA |
| 753. | 5′PM8-VH-E | artificial | nt | TCC ACC GCC TAC ATG GAA CTG TCC RGC CTG ASG TCT GAG GAC ACC GCC |
| | | | | GTG TAC TAC TGC GCC AGG GGC |
| 754. | 3′PM8-VH- | artificial | nt | CGA TAC GGT GAC CAG AGT GCC TCT GCC CCA GGA GTC GAA GTA GTA CCA |
| | F-BstEII | | | GTT CTC GCC CCT GGC GCA GTA GTA |
| 755. | 5′PM3-VL- | artificial | nt | CTT GAT GAG CTC CAG ATG ACC CAG TCC CCC ARS TYC MTG TCC RCC TCC |
| | A-SacI | | | GTG GGC GAC AGA GTG ACC |
| 756. | 3′PM3-VL-B | artificial | nt | GCC GGG CTT CTG CTG AWA CCA GGC CAC GTT GGT GTC CAC GTT CTG GGA |
| | | | | GGC CTT GCA GGT GAY GGT CAC TCT GTC GCC |
| 757. | 5′PM3-VL-C | artificial | nt | CAG CAG AAG CCC GGC MAG KCC CCT AAG KCC CTG ATC TAC TCC GCC TCC |
| | | | | TAC CGG TAC TCT |
| 758. | 3′PM3-VL-D | artificial | nt | CAG GGT GAA GTC GGT GCC GGA CYC GGA GCC GGA GAA CCG GKM AGG CAC |
| | | | | GYC AGA GTA CCG GTA GGA |
| 759. | 5′PM3-VL-E | artificial | nt | ACC GAC TTC ACC CTG ACC ATC TCC ARC STG CAG YCT GAG GAC YTC GCC |
| | | | | RMG TAC TWC TGC CAG CAG TAC GAC |
| 760. | 3′PM3-VL-F- | artificial | nt | CGA GTA ACT AGT CGT ACG CTT GAT TTC CAG CTT GGT CCC TCC GCC GAA |
| | BsiWI/SpeI | | | GGT GTA AGG GTA GGA GTC GTA CTG CTG GCA |
| 761. | 5′PM4-VL- | artificial | nt | CTT GAT GAG CTC GTG ATG ACC CAG TCC CCC CTG TCC CTG CCT GTG AYC |
| | A-SacI | | | CTG GGC SAM CMG GCC TCC ATC TCC TGC CGG |
| 762. | 3′PM4-VL-B | artificial | nt | AAA CCA GTG CAG GTA GGT ATT GCC GTT GGA GTG CAC CAG GGA CTG GGA |
| | | | | GGA CCG GCA GGA GAT GGA GGC |
| 763. | 5′PM4-VL-C | artificial | nt | ACC TAC CTG CAC TGG TTT CWG CAG ARG CCT GGC CAG TCC CCT ARG CKG |
| | | | | CTG ATC TAC ACC GTG TCC AAC CGG |
| 764. | 3′PM4-VL-D | artificial | nt | CAG GGT GAA GTC GGT GCC GGA GCC GGA GCC AGA GAA CCT GTC AGG CAC |
| | | | | GCC GGA GAA CCG GTT GGA CAC GGT |
| 765. | 5′PM4-VL-E | artificial | nt | GGC ACC GAC TTC ACC CTG AAG ATC TCC CGG GTG GAG GCC GAA GAT STG |
| | | | | GGC GTG TAC TWT TGC TCC CAG TCC ACC |
| 766. | 3′PM4-VL-F- | artificial | nt | ACT CAG ACT AGT CGT ACG CTT GAT TTC CAG CTT GGT CCC TCC GCC GAA |
| | BsiWI/SpeI | | | GGT AGG CAC GTG GGT GGA CTG GGA GCA |
| 767. | 5′PM8-VL- | artificial | nt | CTT GAT GAG CTC GTG ATG ACC CAG TCT CCA SYC TCC CTG SCT GTG ACT |
| | A-SacI | | | CTG GGC CAG CSG GCC TCC ATC TCT TGC CGG |
| 768. | 3′PM8-VL-B | artificial | nt | CCA GTG CAT GAA GGT GTT GTC GTA GGA GTC GAT GGA CTC GGA GGC CCG |
| | | | | GCA AGA GAT GGA GGC |
| 769. | 5′PM8-VL-C | artificial | nt | ACC TTC ATG CAC TGG TWT CAG CAG ARG CCT GGC CAG YCT CCT MRC CKG |
| | | | | CTG ATC TWC CGG GCC TCT ATC CTG GAA |
| 770. | 3′PM8-VL-D | artificial | nt | CAG GGT GAA GTC GGT GCC GGA GCC AGA GCC GGA GAA CCG GKC AGG GAY |
| | | | | GCC GGA TTC CAG GAT AGA GGC CCG |
| 771. | 5′PM8-VL-E | artificial | nt | ACC GAC TTC ACC CTG AMA ATC TMC CST GTG GAG GCC GAS GAC GTG GSC |
| | | | | RYC TAC TAC TGC CAC CAG |
| 772. | 3′PM8-VL-F- | artificial | nt | ACT CAG ACT AGT CGT ACG CTT GAT TTC CAG CTT GGT CCC TCC GCC GAA |
| | BsiWI/SpeI | | | GGT GTA AGG GTC CTC GAT GGA CTG GTG GCA GTA GTA |
| 773. | PM84D7-H | artificial | aa | QVQLVQSGAEVKKPGASVKLSCKASGYTFTYFDINWVRQAPEQGLEWMGGISPGDGN |
| | | | | TNYNENFKGRVTMTIDTSSSTAYIELSRLTSDDTAVYYCARDGNFPYYAMDSWGQGTT |
| | | | | VTVSS |
| 774. | PM84D7- | artificial | aa | YFDIN |
| | HCDR1 | | | |
| 775. | PM84D7- | artificial | aa | GISPGDGNTNYNENFKG |
| | HCDR2 | | | |
| 776. | PM84D7- | artificial | aa | DGNFPYYAMDS |
| | HCDR3 | | | |
| 777. | PM84D7-H | artificial | nt | CAGGTGCAGCTGGTCCAGTCTGGCGCCGAAGTGAAGAAGCCTGGCGCCTCCGTGA |
| | | | | AGCTGTCCTGCAAGGCCTCCGGCTACACCTTCACCTACTTCGACATCAACTGGGTG |
| | | | | CGGCAGGCGCCTGAGCAGGGCCTGGAATGGATGGGCGGCATCTCCCCTGGCGAC |
| | | | | GGCAACACCAACTACAACGAGAACTTCAAGGGCAGGGTCACAATGACCATAGACAC |
| | | | | GTCCAGCTCCACCGCCTACATCGAGCTGTCCCGGCTGACATCTGACGACACCGCC |
| | | | | GTGTACTACTGCGCCAGGGACGGCAACTTCCCTTACTACGCCATGGACTCTTGGGG |
| | | | | CCAGGGCACCACGGTGACCGTCTCCTCA |
| 778. | PM84D7-L | artificial | aa | DIVMTQSPLSLPVTLGQQASISCRSSQSLVHSNGNTYLHWFQQRPGQSPKLLIYTVSNR |
| | | | | FSGVPDRFSGSGSGTDFTLKISRVEAEDVGVYYCSQSTHVPTFGGGTKLEIK |
| 779. | PM84D7-LCDR1 | artificial | aa | RSSQSLVHSNGNTYLH |
| 780. | PM84D7-LCDR2 | artificial | aa | TVSNRFS |
| 781. | PM84D7-LCDR3 | artificial | aa | SQSTHVPT |
| 782. | PM84D7-L | artificial | nt | GACATCGTGATGACCCAGTCCCCCCTGTCCCTGCCTGTGACCCTGGGCCAACAGG |
| | | | | CCTCCATCTCCTGCCGGTCCTCCCAGTCCCTGGTGCACTCCAACGGCAATACCTAC |
| | | | | CTGCACTGGTTTCAGCAGAGGCCTGGCCAGTCCCCTAAGCTGCTGATCTACACCGT |
| | | | | GTCCAACCGGTTCTCCGGCGTGCCTGACAGGTTCTCTGGCTCCGGCTCCGGCACC |
| | | | | GACTTCACCCTGAAGATCTCCCGGGTGGAGGCCGAAGATGTGGGCGTGTACTATT |
| | | | | GCTCCCAGTCCACCCACGTGCCTACCTTCGGCGGAGGGACCAAGCTGGAAATCAAG |
| 783. | PM84D7-HL | artificial | aa | QVQLVQSGAEVKKPGASVKLSCKASGYTFTYFDINWVRQAPEQGLEWMGGISPGDGN |
| | | | | TNYNENFKGRVTMTIDTSSSTAYIELSRLTSDDTAVYYCARDGNFPYYAMDSWGQGTT |
| | | | | VTVSSGGGGSGGGGSGGGGSDIVMTQSPLSLPVTLGQQASISCRSSQSLVHSNGNTY |
| | | | | LHWFQQRPGQSPKLLIYTVSNRFSGVPDRFSGSGSGTDFTLKISRVEAEDVGVYYCSQ |
| | | | | STHVPTFGGGTKLEIK |
| 784. | PM84D7-HL | artificial | nt | CAGGTGCAGCTGGTCCAGTCTGGCGCCGAAGTGAAGAAGCCTGGCGCCTCCGTGA |
| | | | | AGCTGTCCTGCAAGGCCTCCGGCTACACCTTCACCTACTTCGACATCAACTGGGTG |
| | | | | CGGCAGGCGCCTGAGCAGGGCCTGGAATGGATGGGCGGCATCTCCCCTGGCGAC |
| | | | | GGCAACACCAACTACAACGAGAACTTCAAGGGCAGGGTCACAATGACCATAGACAC |
| | | | | GTCCAGCTCCACCGCCTACATCGAGCTGTCCCGGCTGACATCTGACGACACCGCC |
| | | | | GTGTACTACTGCGCCAGGGACGGCAACTTCCCTTACTACGCCATGGACTCTTGGGG |
| | | | | CCAGGGCACCACGGTGACCGTCTCCTCAGGTGGTGGTGGTTCTGGCGGCGGCGG |
| | | | | CTCCGGTGGTGGTGGTTCTGACATCGTGATGACCCAGTCCCCCCTGTCCCTGCCTG |
| | | | | TGACCCTGGGCCAACAGGCCTCCATCTCCTGCCGGTCCTCCCAGTCCCTGGTGCA |
| | | | | CTCCAACGGCAATACCTACCTGCACTGGTTTCAGCAGAGGCCTGGCCAGTCCCCTA |
| | | | | AGCTGCTGATCTACACCGTGTCCAACCGGTTCTCCGGCGTGCCTGACAGGTTCTCT |
| | | | | GGCTCCGGCTCCGGCACCGACTTCACCCTGAAGATCTCCCGGGTGGAGGCCGAAG |
| | | | | ATGTGGGCGTGTACTATTGCTCCCAGTCCACCCACGTGCCTACCTTCGGCGGAGG |
| | | | | GACCAAGCTGGAAATCAAG |
| 785. | PM84D7 | artificial | aa | QVQLVQSGAEVKKPGASVKLSCKASGYTFTYFDINWVRQAPEQGLEWMGGISPGDGN |
| | HL x I2C HL | | | TNYNENFKGRVTMTIDTSSSTAYIELSRLTSDDTAVYYCARDGNFPYYAMDSWGQGTT |
| | | | | VTVSSGGGGSGGGGSGGGGSDIVMTQSPLSLPVTLGQQASISCRSSQSLVHSNGNTY |
| | | | | LHWFQQRPGQSPKLLIYTVSNRFSGVPDRFSGSGSGTDFTLKISRVEAEDVGVYYCSQ |
| | | | | STHVPTFGGGTKLEIKSGGGGSEVQLVESGGGLVQPGGSLKLSCAASGFTFNKYAMN |
| | | | | WVRQAPGKGLEWVARIRSKYNNYATYYADSVKDRFTISRDDSKNTAYLQMNNLKTEDT |
| | | | | AVYYCVRHGNFGNSYISYWAYWGQGTLVTVSSGGGGSGGGGSGGGGSQTVVTQEP |
| | | | | SLTVSPGGTVTLTCGSSTGAVTSGNYPNWVQQKPGQAPRGLIGGTKFLAPGTPARFSG |
| | | | | SLLGGKAALTLSGVQPEDEAEYYCVLWYSNRWVFGGGTKLTVL |
| 786. | PM84D7 | artificial | nt | CAGGTGCAGCTGGTCCAGTCTGGCGCCGAAGTGAAGAAGCCTGGCGCCTCCGTGA |
| | HL x I2C HL | | | AGCTGTCCTGCAAGGCCTCCGGCTACACCTTCACCTACTTCGACATCAACTGGGTG |
| | | | | CGGCAGGCGCCTGAGCAGGGCCTGGAATGGATGGGCGGCATCTCCCCTGGCGAC |
| | | | | GGCAACACCAACTACAACGAGAACTTCAAGGGCAGGGTCACAATGACCATAGACAC |
| | | | | GTCCAGCTCCACCGCCTACATCGAGCTGTCCCGGCTGACATCTGACGACACCGCC |
| | | | | GTGTACTACTGCGCCAGGGACGGCAACTTCCCTTACTACGCCATGGACTCTTGGGG |
| | | | | CCAGGGCACCACGGTGACCGTCTCCTCAGGTGGTGGTGGTTCTGGCGGCGGCGG |
| | | | | CTCCGGTGGTGGTGGTTCTGACATCGTGATGACCCAGTCCCCCCTGTCCCTGCCTG |
| | | | | TGACCCTGGGCCAACAGGCCTCCATCTCCTGCCGGTCCTCCCAGTCCCTGGTGCA |
| | | | | CTCCAACGGCAATACCTACCTGCACTGGTTTCAGCAGAGGCCTGGCCAGTCCCCTA |
| | | | | AGCTGCTGATCTACACCGTGTCCAACCGGTTCTCCGGCGTGCCTGACAGGTTCTCT |
| | | | | GGCTCCGGCTCCGGCACCGACTTCACCCTGAAGATCTCCCGGGTGGAGGCCGAAG |
| | | | | ATGTGGGCGTGTACTATTGCTCCCAGTCCACCCACGTGCCTACCTTCGGCGGAGG |
| | | | | GACCAAGCTGGAAATCAAGTCCGGAGGTGGTGGATCCGAGGTGCAGCTGGTCGAG |
| | | | | TCTGGAGGAGGATTGGTGCAGCCTGGAGGGTCATTGAAACTCTCATGTGCAGCCTC |
| | | | | TGGATTCACCTTCAATAAGTACGCCATGAACTGGGTCCGCCAGGCTCCAGGAAAGG |
| | | | | GTTTGGAATGGGTTGCTCGCATAAGAAGTAAATATAATAATTATGCAACATATTATGC |
| | | | | CGATTCAGTGAAAGACAGGTTCACCATCTCCAGAGATGATTCAAAAAACACTGCCTA |
| | | | | TCTACAAATGAACAACTTGAAAACTGAGGACACTGCCGTGTACTACTGTGTGAGACA |
| | | | | TGGGAACTTCGGTAATAGCTACATATCCTACTGGGCTTACTGGGGCCAAGGGACTC |
| | | | | TGGTCACCGTCTCCTCAGGTGGTGGTGGTTCTGGCGGCGGCGGCTCCGGTGGTG |
| | | | | GTGGTTCTCAGACTGTTGTGACTCAGGAACCTTCACTCACCGTATCACCTGGTGGA |
| | | | | ACAGTCACACTCACTTGTGGCTCCTCGACTGGGGCTGTTACATCTGGCAACTACCC |
| | | | | AAACTGGGTCCAACAAAAACCAGGTCAGGCACCCCGTGGTCTAATAGGTGGGACTA |
| | | | | AGTTCCTCGCCCCCGGTACTCCTGCCAGATTCTCAGGCTCCCTGCTTGGAGGCAAG |
| | | | | GCTGCCCTCACCCTCTCAGGGGTACAGCCAGAGGATGAGGCAGAATATTACTGTGT |
| | | | | TCTATGGTACAGCAACCGCTGGGTGTTCGGTGGAGGAACCAAACTGACTGTCCTA |
| 787. | PM76A9-H | artificial | aa | QVQLVESGGGLVKPGGSLRLSCAASGFTFSDYYMYWVRQAPGKGLEWVAIISDGGYY |
| | | | | TYYSDIIKGRFTISRDNAKNNLYLQMNSLRAEDTAVYYCARGFPLLRHGAMDYWGQGTL |
| | | | | VTVSS |
| 788. | PM76A9-HCDR1 | artificial | aa | DYYMY |
| 789. | PM76A9-HCDR2 | artificial | aa | IISDGGYYTYYSDIIKG |
| 790. | PM76A9-HCDR3 | artificial | aa | GFPLLRHGAMDY |
| 791. | PM76A9-H | artificial | nt | CAGGTGCAGCTGGTCGAGTCTGGCGGCGGACTGGTGAAGCCTGGCGGGTCCCTG |
| | | | | AGGCTGTCCTGTGCCGCCTCCGGCTTCACCTTCTCCGACTACTACATGTACTGGGT |
| | | | | CCGCCAGGCCCCTGGGAAGGGGCTGGAATGGGTGGCCATCATCTCCGACGGCGG |
| | | | | CTACTACACCTACTACTCCGACATCATCAAGGGCCGGTTCACCATCTCCCGGGACA |
| | | | | ACGCCAAGAACAATCTGTACCTGCAGATGAACTCCCTGAGGGCCGAGGACACCGC |
| | | | | CGTGTACTACTGCGCCCGGGGCTTCCCTCTGCTGAGACACGGCGCCATGGATTAC |
| | | | | TGGGGCCAGGGCACCCTGGTCACCGTCTCCTCA |
| 792. | PM76A9-L | artificial | aa | DIQMTQSPSSLSASVGDRVTITCKASQNVDTNVAWYQQKPGQAPKSLIYSASYRYSDV |
| | | | | PSRFSGSASGTDFTLTISSVQSEDFATYYCQQYDSYPYTFGGGTKLEIK |
| 793. | PM76A9-LCDR1 | artificial | aa | KASQNVDTNVA |
| 794. | PM76A9-LCDR2 | artificial | aa | SASYRYS |
| 795. | PM76A9-LCDR3 | artificial | aa | QQYDSYPYT |
| 796. | PM76A9-L | artificial | nt | GACATCCAGATGACCCAGTCCCCCAGCTCCCTGTCCGCCTCCGTGGGCGACAGAG |
| | | | | TGACCATCACCTGCAAGGCCTCCCAGAACGTGGACACCAACGTGGCCTGGTATCA |
| | | | | GCAGAAGCCCGGCCAGGCCCCTAAGTCCCTGATCTACTCCGCCTCCTACCGGTAC |
| | | | | TCTGACGTGCCTTCCCGGTTCTCCGGCTCCGCGTCCGGCACCGACTTCACCCTGA |
| | | | | CCATCTCCAGCGTGCAGTCTGAGGACTTCGCCACGTACTACTGCCAGCAGTACGAC |
| | | | | TCCTACCCTTACACCTTCGGCGGAGGGACCAAGCTGGAAATCAAG |
| 797. | PM76A9-HL | artificial | aa | QVQLVESGGGLVKPGGSLRLSCAASGFTFSDYYMYWVRQAPGKGLEWVAIISDGGYY |
| | | | | TYYSDIIKGRFTISRDNAKNNLYLQMNSLRAEDTAVYYCARGFPLLRHGAMDYWGQGTL |
| | | | | VTVSSGGGGSGGGGSGGGGSDIQMTQSPSSLSASVGDRVTITCKASQNVDTNVAWY |
| | | | | QQKPGQAPKSLIYSASYRYSDVPSRFSGSASGTDFTLTISSVQSEDFATYYCQQYDSYP |
| | | | | YTFGGGTKLEIK |
| 798. | PM76A9-HL | artificial | nt | CAGGTGCAGCTGGTCGAGTCTGGCGGCGGACTGGTGAAGCCTGGCGGGTCCCTG |
| | | | | AGGCTGTCCTGTGCCGCCTCCGGCTTCACCTTCTCCGACTACTACATGTACTGGGT |
| | | | | CCGCCAGGCCCCTGGGAAGGGGCTGGAATGGGTGGCCATCATCTCCGACGGCGG |
| | | | | CTACTACACCTACTACTCCGACATCATCAAGGGCCGGTTCACCATCTCCCGGGACA |
| | | | | ACGCCAAGAACAATCTGTACCTGCAGATGAACTCCCTGAGGGCCGAGGACACCGC |
| | | | | CGTGTACTACTGCGCCCGGGGCTTCCCTCTGCTGAGACACGGCGCCATGGATTAC |
| | | | | TGGGGCCAGGGCACCCTGGTCACCGTCTCCTCAGGTGGTGGTGGTTCTGGCGGC |
| | | | | GGCGGCTCCGGTGGTGGTGGTTCTGACATCCAGATGACCCAGTCCCCCAGCTCCC |
| | | | | TGTCCGCCTCCGTGGGCGACAGAGTGACCATCACCTGCAAGGCCTCCCAGAACGT |
| | | | | GGACACCAACGTGGCCTGGTATCAGCAGAAGCCCGGCCAGGCCCCTAAGTCCCTG |
| | | | | ATCTACTCCGCCTCCTACCGGTACTCTGACGTGCCTTCCCGGTTCTCCGGCTCCGC |
| | | | | GTCCGGCACCGACTTCACCCTGACCATCTCCAGCGTGCAGTCTGAGGACTTCGCCA |
| | | | | CGTACTACTGCCAGCAGTACGACTCCTACCCTTACACCTTCGGCGGAGGGACCAAG |
| | | | | CTGGAAATCAAG |
| 799. | PM76A9 | artificial | aa | QVQLVESGGGLVKPGGSLRLSCAASGFTFSDYYMYWVRQAPGKGLEWVAIISDGGYY |
| | HL x I2C HL | | | TYYSDIIKGRFTISRDNAKNNLYLQMNSLRAEDTAVYYCARGFPLLRHGAMDYWGQGTL |
| | | | | VTVSSGGGGSGGGGSGGGGSDIQMTQSPSSLSASVGDRVTITCKASQNVDTNVAWY |
| | | | | QQKPGQAPKSLIYSASYRYSDVPSRFSGSASGTDFTLTISSVQSEDFATYYCQQYDSYP |
| | | | | YTFGGGTKLEIKSGGGGSEVQLVESGGGLVQPGGSLKLSCAASGFTFNKYAMNWVRQ |
| | | | | APGKGLEWVARIRSKYNNYATYYADSVKDRFTISRDDSKNTAYLQMNNLKTEDTAVYY |
| | | | | CVRHGNFGNSYISYWAYWGQGTLVTVSSGGGGSGGGGSGGGGSQTVVTQEPSLTVS |
| | | | | PGGTVTLTCGSSTGAVTSGNYPNWVQQKPGQAPRGLIGGTKFLAPGTPARFSGSLLG |
| | | | | GKAALTLSGVQPEDEAEYYCVLWYSNRWVFGGGTKLTVL |
| 800. | PM76A9 | artificial | nt | CAGGTGCAGCTGGTCGAGTCTGGCGGCGGACTGGTGAAGCCTGGCGGGTCCCTG |
| | HL x I2C HL | | | AGGCTGTCCTGTGCCGCCTCCGGCTTCACCTTCTCCGACTACTACATGTACTGGGT |
| | | | | CCGCCAGGCCCCTGGGAAGGGGCTGGAATGGGTGGCCATCATCTCCGACGGCGG |
| | | | | CTACTACACCTACTACTCCGACATCATCAAGGGCCGGTTCACCATCTCCCGGGACA |
| | | | | ACGCCAAGAACAATCTGTACCTGCAGATGAACTCCCTGAGGGCCGAGGACACCGC |
| | | | | CGTGTACTACTGCGCCCGGGGCTTCCCTCTGCTGAGACACGGCGCCATGGATTAC |
| | | | | TGGGGCCAGGGCACCCTGGTCACCGTCTCCTCAGGTGGTGGTGGTTCTGGCGGC |
| | | | | GGCGGCTCCGGTGGTGGTGGTTCTGACATCCAGATGACCCAGTCCCCCAGCTCCC |
| | | | | TGTCCGCCTCCGTGGGCGACAGAGTGACCATCACCTGCAAGGCCTCCCAGAACGT |
| | | | | GGACACCAACGTGGCCTGGTATCAGCAGAAGCCCGGCCAGGCCCCTAAGTCCCTG |
| | | | | ATCTACTCCGCCTCCTACCGGTACTCTGACGTGCCTTCCCGGTTCTCCGGCTCCGC |
| | | | | GTCCGGCACCGACTTCACCCTGACCATCTCCAGCGTGCAGTCTGAGGACTTCGCCA |
| | | | | CGTACTACTGCCAGCAGTACGACTCCTACCCTTACACCTTCGGCGGAGGGACCAAG |
| | | | | CTGGAAATCAAGTCCGGAGGTGGTGGATCCGAGGTGCAGCTGGTCGAGTCTGGAG |
| | | | | GAGGATTGGTGCAGCCTGGAGGGTCATTGAAACTCTCATGTGCAGCCTCTGGATTC |
| | | | | ACCTTCAATAAGTACGCCATGAACTGGGTCCGCCAGGCTCCAGGAAAGGGTTTGGA |
| | | | | ATGGGTTGCTCGCATAAGAAGTAAATATAATAATTATGCAACATATTATGCCGATTCA |
| | | | | GTGAAAGACAGGTTCACCATCTCCAGAGATGATTCAAAAAACACTGCCTATCTACAA |
| | | | | ATGAACAACTTGAAAACTGAGGACACTGCCGTGTACTACTGTGTGAGACATGGGAA |
| | | | | CTTCGGTAATAGCTACATATCCTACTGGGCTTACTGGGGCCAAGGGACTCTGGTCA |
| | | | | CCGTCTCCTCAGGTGGTGGTGGTTCTGGCGGCGGCGGCTCCGGTGGTGGTGGTTC |
| | | | | TCAGACTGTTGTGACTCAGGAACCTTCACTCACCGTATCACCTGGTGGAACAGTCA |
| | | | | CACTCACTTGTGGCTCCTCGACTGGGGCTGTTACATCTGGCAACTACCCAAACTGG |
| | | | | GTCCAACAAAAACCAGGTCAGGCACCCCGTGGTCTAATAGGTGGGACTAAGTTCCT |
| | | | | CGCCCCCGGTACTCCTGCCAGATTCTCAGGCTCCCTGCTTGGAGGCAAGGCTGCC |
| | | | | CTCACCCTCTCAGGGGTACAGCCAGAGGATGAGGCAGAATATTACTGTGTTCTATG |
| | | | | GTACAGCAACCGCTGGGTGTTCGGTGGAGGAACCAAACTGACTGTCCTA |
| 801. | PM76A9-H | artificial | nt | CAGGTGCAGCTGGTCGAGTCTGGCGGCGGACTGGTCAAGCCTGGCGGCTCCCTG |
| | codon | | | AGACTGTCTTGCGCTGCCTCCGGCTTCACCTTCTCCGACTACTACATGTACTGGGT |
| | optimized | | | CCGCCAGGCTCCTGGCAAGGGACTGGAATGGGTGGCCATCATCTCCGACGGCGG |
| | | | | CTACTACACCTACTACTCCGACATCATCAAGGGCCGGTTCACCATCTCCAGGGACA |
| | | | | ACGCTAAGAACAACCTGTACCTGCAGATGAACTCCCTGAGGGCCGAGGACACCGC |
| | | | | CGTGTACTACTGCGCCAGGGGCTTCCCACTGCTGAGACACGGCGCCATGGATTAC |
| | | | | TGGGGCCAGGGCACCCTGGTCACAGTGTCCTCT |
| 802. | PM76A9-L | artificial | nt | GACATCCAGATGACCCAGTCCCCATCCTCCCTGTCTGCCTCCGTGGGCGACAGAGT |
| | codon | | | GACCATCACATGCAAGGCCTCCCAGAACGTGGACACCAACGTGGCATGGTATCAG |
| | optimized | | | CAGAAGCCAGGCCAGGCCCCTAAGTCCCTGATCTACTCTGCCTCCTACCGGTACTC |
| | | | | CGACGTGCCCTCCAGGTTCTCTGGCTCCGCCTCTGGCACCGACTTCACCCTGACCA |
| | | | | TCTCTTCCGTGCAGTCCGAGGACTTCGCTACCTACTACTGCCAGCAGTACGACTCC |
| | | | | TACCCTTACACCTTCGGCGGAGGCACCAAGCTGGAAATCAAG |
| 803. | PM76A9-HL | artificial | nt | CAGGTGCAGCTGGTCGAGTCTGGCGGCGGACTGGTCAAGCCTGGCGGCTCCCTG |
| | codon | | | AGACTGTCTTGCGCTGCCTCCGGCTTCACCTTCTCCGACTACTACATGTACTGGGT |
| | optimized | | | CCGCCAGGCTCCTGGCAAGGGACTGGAATGGGTGGCCATCATCTCCGACGGCGG |
| | | | | CTACTACACCTACTACTCCGACATCATCAAGGGCCGGTTCACCATCTCCAGGGACA |
| | | | | ACGCTAAGAACAACCTGTACCTGCAGATGAACTCCCTGAGGGCCGAGGACACCGC |
| | | | | CGTGTACTACTGCGCCAGGGGCTTCCCACTGCTGAGACACGGCGCCATGGATTAC |
| | | | | TGGGGCCAGGGCACCCTGGTCACAGTGTCCTCTGGCGGAGGCGGAAGTGGAGGC |
| | | | | GGAGGAAGCGGAGGCGGCGGATCCGACATCCAGATGACCCAGTCCCCATCCTCCC |
| | | | | TGTCTGCCTCCGTGGGCGACAGAGTGACCATCACATGCAAGGCCTCCCAGAACGT |
| | | | | GGACACCAACGTGGCATGGTATCAGCAGAAGCCAGGCCAGGCCCCTAAGTCCCTG |
| | | | | ATCTACTCTGCCTCCTACCGGTACTCCGACGTGCCCTCCAGGTTCTCTGGCTCCGC |
| | | | | CTCTGGCACCGACTTCACCCTGACCATCTCTTCCGTGCAGTCCGAGGACTTCGCTA |
| | | | | CCTACTACTGCCAGCAGTACGACTCCTACCCTTACACCTTCGGCGGAGGCACCAAG |
| | | | | CTGGAAATCAAG |
| 804. | PM76A9 | artificial | nt | CAGGTGCAGCTGGTCGAGTCTGGCGGCGGACTGGTCAAGCCTGGCGGCTCCCTG |
| | HL x I2C | | | AGACTGTCTTGCGCTGCCTCCGGCTTCACCTTCTCCGACTACTACATGTACTGGGT |
| | HL_codon | | | CCGCCAGGCTCCTGGCAAGGGACTGGAATGGGTGGCCATCATCTCCGACGGCGG |
| | optimized | | | CTACTACACCTACTACTCCGACATCATCAAGGGCCGGTTCACCATCTCCAGGGACA |
| | | | | ACGCTAAGAACAACCTGTACCTGCAGATGAACTCCCTGAGGGCCGAGGACACCGC |
| | | | | CGTGTACTACTGCGCCAGGGGCTTCCCACTGCTGAGACACGGCGCCATGGATTAC |
| | | | | TGGGGCCAGGGCACCCTGGTCACAGTGTCCTCTGGCGGAGGCGGAAGTGGAGGC |
| | | | | GGAGGAAGCGGAGGCGGCGGATCCGACATCCAGATGACCCAGTCCCCATCCTCCC |
| | | | | TGTCTGCCTCCGTGGGCGACAGAGTGACCATCACATGCAAGGCCTCCCAGAACGT |
| | | | | GGACACCAACGTGGCATGGTATCAGCAGAAGCCAGGCCAGGCCCCTAAGTCCCTG |
| | | | | ATCTACTCTGCCTCCTACCGGTACTCCGACGTGCCCTCCAGGTTCTCTGGCTCCGC |
| | | | | CTCTGGCACCGACTTCACCCTGACCATCTCTTCCGTGCAGTCCGAGGACTTCGCTA |
| | | | | CCTACTACTGCCAGCAGTACGACTCCTACCCTTACACCTTCGGCGGAGGCACCAAG |
| | | | | CTGGAAATCAAGTCCGGCGGAGGGGGCTCTGAAGTGCAGCTGGTGGAAAGCGGA |
| | | | | GGGGGACTGGTGCAGCCCGGGGGAAGTCTGAAGCTGTCCTGTGCCGCCAGCGGC |
| | | | | TTTACCTTCAACAAGTACGCCATGAATTGGGTCCGACAGGCCCCAGGGAAAGGCCT |
| | | | | GGAATGGGTGGCACGGATCCGGTCCAAGTACAACAACTACGCCACCTACTACGCT |
| | | | | GACTCCGTGAAGGACAGATTCACCATCAGCCGGGACGACTCTAAGAACACCGCCTA |
| | | | | TCTGCAGATGAACAACCTGAAAACCGAGGATACAGCTGTGTACTATTGTGTGCGGC |
| | | | | ACGGCAACTTCGGCAACTCCTACATCTCCTACTGGGCCTATTGGGGACAGGGAACA |
| | | | | CTGGTCACCGTGTCTAGCGGAGGTGGCGGAAGTGGGGGAGGCGGATCTGGCGGT |
| | | | | GGCGGATCCCAGACCGTGGTCACCCAGGAACCTTCCCTGACCGTCTCCCCAGGCG |
| | | | | GCACCGTGACCCTGACCTGTGGCTCCTCTACCGGCGCTGTGACCTCCGGCAACTA |
| | | | | CCCTAACTGGGTGCAGCAGAAACCCGGACAGGCTCCTAGAGGCCTGATCGGCGGC |
| | | | | ACCAAGTTTCTGGCCCCTGGCACCCCTGCCAGATTCTCCGGCTCCCTGCTGGGAG |
| | | | | GCAAGGCCGCTCTGACCCTGTCTGGCGTGCAGCCTGAGGACGAGGCCGAGTACTA |
| | | | | CTGTGTGCTGTGGTACTCCAACAGATGGGTGTTCGGAGGCGGCACAAAGCTGACC |
| | | | | GTGCTG |
| 805. | PM76B10-H | artificial | aa | QVQLVESGGGLVKPGESLRLSCAASGFTFSDYYMYWVRQAPGKGLEWVAIISDGGYY |
| | | | | TYYSDIIKGRFTISRDNAKNSLYLQMNSLKAEDTAVYYCARGFPLLRHGAMDYWGQGTL |
| | | | | VTVSS |
| 806. | PM76B10-HCDR1 | artificial | aa | DYYMY |
| 807. | PM76B10-HCDR2 | artificial | aa | IISDGGYYTYYSDIIKG |
| 808. | PM76B10-HCDR3 | artificial | aa | GFPLLRHGAMDY |
| 809. | PM76B10-H | artificial | nt | CAGGTGCAGCTGGTCGAGTCTGGCGGCGGACTGGTGAAGCCTGGCGAGTCCCTG |
| | | | | AGGCTGTCCTGTGCCGCCTCCGGCTTCACCTTCTCCGACTACTACATGTACTGGGT |
| | | | | CCGCCAGGCCCCTGGGAAGGGGCTGGAATGGGTGGCCATCATCTCCGACGGCGG |
| | | | | CTACTACACCTACTACTCCGACATCATCAAGGGCCGGTTCACCATCTCCCGGGACA |
| | | | | ACGCCAAGAACAGCCTGTACCTGCAGATGAACTCCCTGAAGGCCGAGGACACCGC |
| | | | | CGTGTACTACTGCGCCCGGGGCTTCCCTCTGCTGAGACACGGCGCCATGGATTAC |
| | | | | TGGGGCCAGGGCACCCTGGTCACCGTCTCCTCA |
| 810. | PM76B10-L | artificial | aa | DIQMTQSPSSLSASVGDRVTITCKASQNVDTNVAWYQQKPGQAPKSLIYSASYRYSDV |
| | | | | PSRFSGSASGTDFTLTISSVQSEDFATYYCQQYDSYPYTFGGGTKLEIK |
| 811. | PM76B10-LCDR1 | artificial | aa | KASQNVDTNVA |
| 812. | PM76B10-LCDR2 | artificial | aa | SASYRYS |
| 813. | PM76B10-LCDR3 | artificial | aa | QQYDSYPYT |
| 814. | PM76B10-L | artificial | nt | GACATCCAGATGACCCAGTCCCCCAGCTCCCTGTCCGCCTCCGTGGGCGACAGAG |
| | | | | TGACCATCACCTGCAAGGCCTCCCAGAACGTGGACACCAACGTGGCCTGGTATCA |
| | | | | GCAGAAGCCCGGCCAGGCCCCTAAGTCCCTGATCTACTCCGCCTCCTACCGGTAC |
| | | | | TCTGACGTGCCTTCCCGGTTCTCCGGCTCCGCGTCCGGCACCGACTTCACCCTGA |
| | | | | CCATCTCCAGCGTGCAGTCTGAGGACTTCGCCACGTACTACTGCCAGCAGTACGAC |
| | | | | TCCTACCCTTACACCTTCGGCGGAGGGACCAAGCTGGAAATCAAG |
| 815. | PM76B10-HL | artificial | aa | QVQLVESGGGLVKPGESLRLSCAASGFTFSDYYMYWVRQAPGKGLEWVAIISDGGYY |
| | | | | TYYSDIIKGRFTISRDNAKNSLYLQMNSLKAEDTAVYYCARGFPLLRHGAMDYWGQGTL |
| | | | | VTVSSGGGGSGGGGSGGGGSDIQMTQSPSSLSASVGDRVTITCKASQNVDTNVAWY |
| | | | | QQKPGQAPKSLIYSASYRYSDVPSRFSGSASGTDFTLTISSVQSEDFATYYCQQYDSYP |
| | | | | YTFGGGTKLEIK |
| 816. | PM76B10-HL | artificial | nt | CAGGTGCAGCTGGTCGAGTCTGGCGGCGGACTGGTGAAGCCTGGCGAGTCCCTG |
| | | | | AGGCTGTCCTGTGCCGCCTCCGGCTTCACCTTCTCCGACTACTACATGTACTGGGT |
| | | | | CCGCCAGGCCCCTGGGAAGGGGCTGGAATGGGTGGCCATCATCTCCGACGGCGG |
| | | | | CTACTACACCTACTACTCCGACATCATCAAGGGCCGGTTCACCATCTCCCGGGACA |
| | | | | ACGCCAAGAACAGCCTGTACCTGCAGATGAACTCCCTGAAGGCCGAGGACACCGC |
| | | | | CGTGTACTACTGCGCCCGGGGCTTCCCTCTGCTGAGACACGGCGCCATGGATTAC |
| | | | | TGGGGCCAGGGCACCCTGGTCACCGTCTCCTCAGGTGGTGGTGGTTCTGGCGGC |
| | | | | GGCGGCTCCGGTGGTGGTGGTTCTGACATCCAGATGACCCAGTCCCCCAGCTCCC |
| | | | | TGTCCGCCTCCGTGGGCGACAGAGTGACCATCACCTGCAAGGCCTCCCAGAACGT |
| | | | | GGACACCAACGTGGCCTGGTATCAGCAGAAGCCCGGCCAGGCCCCTAAGTCCCTG |
| | | | | ATCTACTCCGCCTCCTACCGGTACTCTGACGTGCCTTCCCGGTTCTCCGGCTCCGC |
| | | | | GTCCGGCACCGACTTCACCCTGACCATCTCCAGCGTGCAGTCTGAGGACTTCGCCA |
| | | | | CGTACTACTGCCAGCAGTACGACTCCTACCCTTACACCTTCGGCGGAGGGACCAAG |
| | | | | CTGGAAATCAAG |
| 817. | PM76B10 | artificial | aa | QVQLVESGGGLVKPGESLRLSCAASGFTFSDYYMYWVRQAPGKGLEWVAIISDGGYY |
| | HL x I2C | | | TYYSDIIKGRFTISRDNAKNSLYLQMNSLKAEDTAVYYCARGFPLLRHGAMDYWGQGTL |
| | HL | | | VTVSSGGGGSGGGGSGGGGSDIQMTQSPSSLSASVGDRVTITCKASQNVDTNVAWY |
| | | | | QQKPGQAPKSLlYSASYRYSDVPSRFSGSASGTDFTLTISSVQSEDFATYYCQQYDSYP |
| | | | | YTFGGGTKLEIKSGGGGSEVQLVESGGGLVQPGGSLKLSCAASGFTFNKYAMNWVRQ |
| | | | | APGKGLEWVARIRSKYNNYATYYADSVKDRFTISRDDSKNTAYLQMNNLKTEDTAVYY |
| | | | | CVRHGNFGNSYISYWAYWGQGTLVTVSSGGGGSGGGGSGGGGSQTVVTQEPSLTVS |
| | | | | PGGTVTLTCGSSTGAVTSGNYPNWVQQKPGQAPRGLIGGTKFLAPGTPARFSGSLLG |
| | | | | GKAALTLSGVQPEDEAEYYCVLWYSNRWVFGGGTKLTVL |
| 818. | PM76B10 | artificial | nt | CAGGTGCAGCTGGTCGAGTCTGGCGGCGGACTGGTGAAGCCTGGCGAGTCCCTG |
| | HL x I2C | | | AGGCTGTCCTGTGCCGCCTCCGGCTTCACCTTCTCCGACTACTACATGTACTGGGT |
| | HL | | | CCGCCAGGCCCCTGGGAAGGGGCTGGAATGGGTGGCCATCATCTCCGACGGCGG |
| | | | | CTACTACACCTACTACTCCGACATCATCAAGGGCCGGTTCACCATCTCCCGGGACA |
| | | | | ACGCCAAGAACAGCCTGTACCTGCAGATGAACTCCCTGAAGGCCGAGGACACCGC |
| | | | | CGTGTACTACTGCGCCCGGGGCTTCCCTCTGCTGAGACACGGCGCCATGGATTAC |
| | | | | TGGGGCCAGGGCACCCTGGTCACCGTCTCCTCAGGTGGTGGTGGTTCTGGCGGC |
| | | | | GGCGGCTCCGGTGGTGGTGGTTCTGACATCCAGATGACCCAGTCCCCCAGCTCCC |
| | | | | TGTCCGCCTCCGTGGGCGACAGAGTGACCATCACCTGCAAGGCCTCCCAGAACGT |
| | | | | GGACACCAACGTGGCCTGGTATCAGCAGAAGCCCGGCCAGGCCCCTAAGTCCCTG |
| | | | | ATCTACTCCGCCTCCTACCGGTACTCTGACGTGCCTTCCCGGTTCTCCGGCTCCGC |
| | | | | GTCCGGCACCGACTTCACCCTGACCATCTCCAGCGTGCAGTCTGAGGACTTCGCCA |
| | | | | CGTACTACTGCCAGCAGTACGACTCCTACCCTTACACCTTCGGCGGAGGGACCAAG |
| | | | | CTGGAAATCAAGTCCGGAGGTGGTGGATCCGAGGTGCAGCTGGTCGAGTCTGGAG |
| | | | | GAGGATTGGTGCAGCCTGGAGGGTCATTGAAACTCTCATGTGCAGCCTCTGGATTC |
| | | | | ACCTTCAATAAGTACGCCATGAACTGGGTCCGCCAGGCTCCAGGAAAGGGTTTGGA |
| | | | | ATGGGTTGCTCGCATAAGAAGTAAATATAATAATTATGCAACATATTATGCCGATTCA |
| | | | | GTGAAAGACAGGTTCACCATCTCCAGAGATGATTCAAAAAACACTGCCTATCTACAA |
| | | | | ATGAACAACTTGAAAACTGAGGACACTGCCGTGTACTACTGTGTGAGACATGGGAA |
| | | | | CTTCGGTAATAGCTACATATCCTACTGGGCTTACTGGGGCCAAGGGACTCTGGTCA |
| | | | | CCGTCTCCTCAGGTGGTGGTGGTTCTGGCGGCGGCGGCTCCGGTGGTGGTGGTTC |
| | | | | TCAGACTGTTGTGACTCAGGAACCTTCACTCACCGTATCACCTGGTGGAACAGTCA |
| | | | | CACTCACTTGTGGCTCCTCGACTGGGGCTGTTACATCTGGCAACTACCCAAACTGG |
| | | | | GTCCAACAAAAACCAGGTCAGGCACCCCGTGGTCTAATAGGTGGGACTAAGTTCCT |
| | | | | CGCCCCCGGTACTCCTGCCAGATTCTCAGGCTCCCTGCTTGGAGGCAAGGCTGCC |
| | | | | CTCACCCTCTCAGGGGTACAGCCAGAGGATGAGGCAGAATATTACTGTGTTCTATG |
| | | | | GTACAGCAACCGCTGGGTGTTCGGTGGAGGAACCAAACTGACTGTCCTA |
| 819. | PM76B10-H | artificial | nt | CAGGTGCAGCTGGTCGAGTCTGGCGGCGGACTGGTCAAGCCTGGCGAGTCCCTGA |
| | codon | | | GACTGTCTTGCGCTGCCTCCGGCTTCACCTTCTCCGACTACTACATGTACTGGGTC |
| | optimized | | | CGCCAGGCTCCTGGCAAGGGACTGGAATGGGTGGCCATCATCTCCGACGGCGGCT |
| | | | | ACTACACCTACTACTCCGACATCATCAAGGGCCGGTTCACCATCTCCAGGGACAAC |
| | | | | GCCAAGAACTCCCTGTACCTGCAGATGAACTCCCTGAAGGCCGAGGACACCGCCG |
| | | | | TGTACTACTGCGCCAGGGGCTTCCCACTGCTGAGACACGGCGCCATGGATTACTG |
| | | | | GGGCCAGGGCACCCTGGTCACAGTGTCCTCT |
| 820. | PM76B10-L | artificial | nt | GACATCCAGATGACCCAGTCCCCATCCTCCCTGTCTGCCTCCGTGGGCGACAGAGT |
| | codon | | | GACCATCACATGCAAGGCCTCCCAGAACGTGGACACCAACGTGGCATGGTATCAG |
| | optimized | | | CAGAAGCCAGGCCAGGCCCCTAAGTCCCTGATCTACTCTGCCTCCTACCGGTACTC |
| | | | | CGACGTGCCCTCCAGGTTCTCTGGCTCCGCCTCTGGCACCGACTTCACCCTGACCA |
| | | | | TCTCTTCCGTGCAGTCCGAGGACTTCGCTACCTACTACTGCCAGCAGTACGACTCC |
| | | | | TACCCTTACACCTTCGGCGGAGGCACCAAGCTGGAAATCAAG |
| 821. | PM76B10-HL | artificial | nt | CAGGTGCAGCTGGTCGAGTCTGGCGGCGGACTGGTCAAGCCTGGCGAGTCCCTGA |
| | codon | | | GACTGTCTTGCGCTGCCTCCGGCTTCACCTTCTCCGACTACTACATGTACTGGGTC |
| | optimized | | | CGCCAGGCTCCTGGCAAGGGACTGGAATGGGTGGCCATCATCTCCGACGGCGGCT |
| | | | | ACTACACCTACTACTCCGACATCATCAAGGGCCGGTTCACCATCTCCAGGGACAAC |
| | | | | GCCAAGAACTCCCTGTACCTGCAGATGAACTCCCTGAAGGCCGAGGACACCGCCG |
| | | | | TGTACTACTGCGCCAGGGGCTTCCCACTGCTGAGACACGGCGCCATGGATTACTG |
| | | | | GGGCCAGGGCACCCTGGTCACAGTGTCCTCTGGCGGAGGCGGAAGTGGAGGCGG |
| | | | | AGGAAGCGGAGGCGGCGGATCCGACATCCAGATGACCCAGTCCCCATCCTCCCTG |
| | | | | TCTGCCTCCGTGGGCGACAGAGTGACCATCACATGCAAGGCCTCCCAGAACGTGG |
| | | | | ACACCAACGTGGCATGGTATCAGCAGAAGCCAGGCCAGGCCCCTAAGTCCCTGAT |
| | | | | CTACTCTGCCTCCTACCGGTACTCCGACGTGCCCTCCAGGTTCTCTGGCTCCGCCT |
| | | | | CTGGCACCGACTTCACCCTGACCATCTCTTCCGTGCAGTCCGAGGACTTCGCTACC |
| | | | | TACTACTGCCAGCAGTACGACTCCTACCCTTACACCTTCGGCGGAGGCACCAAGCT |
| | | | | GGAAATCAAG |
| 822. | PM76B10 | artificial | nt | CAGGTGCAGCTGGTCGAGTCTGGCGGCGGACTGGTCAAGCCTGGCGAGTCCCTGA |
| | HL x I2C | | | GACTGTCTTGCGCTGCCTCCGGCTTCACCTTCTCCGACTACTACATGTACTGGGTC |
| | HL codon | | | CGCCAGGCTCCTGGCAAGGGACTGGAATGGGTGGCCATCATCTCCGACGGCGGCT |
| | optimized | | | ACTACACCTACTACTCCGACATCATCAAGGGCCGGTTCACCATCTCCAGGGACAAC |
| | | | | GCCAAGAACTCCCTGTACCTGCAGATGAACTCCCTGAAGGCCGAGGACACCGCCG |
| | | | | TGTACTACTGCGCCAGGGGCTTCCCACTGCTGAGACACGGCGCCATGGATTACTG |
| | | | | GGGCCAGGGCACCCTGGTCACAGTGTCCTCTGGCGGAGGCGGAAGTGGAGGCGG |
| | | | | AGGAAGCGGAGGCGGCGGATCCGACATCCAGATGACCCAGTCCCCATCCTCCCTG |
| | | | | TCTGCCTCCGTGGGCGACAGAGTGACCATCACATGCAAGGCCTCCCAGAACGTGG |
| | | | | ACACCAACGTGGCATGGTATCAGCAGAAGCCAGGCCAGGCCCCTAAGTCCCTGAT |
| | | | | CTACTCTGCCTCCTACCGGTACTCCGACGTGCCCTCCAGGTTCTCTGGCTCCGCCT |
| | | | | CTGGCACCGACTTCACCCTGACCATCTCTTCCGTGCAGTCCGAGGACTTCGCTACC |
| | | | | TACTACTGCCAGCAGTACGACTCCTACCCTTACACCTTCGGCGGAGGCACCAAGCT |
| | | | | GGAAATCAAGTCCGGCGGAGGGGGCTCTGAAGTGCAGCTGGTGGAAAGCGGAGG |
| | | | | GGGACTGGTGCAGCCCGGGGGAAGTCTGAAGCTGTCCTGTGCCGCCAGCGGCTTT |
| | | | | ACCTTCAACAAGTACGCCATGAATTGGGTCCGACAGGCCCCAGGGAAAGGCCTGG |
| | | | | AATGGGTGGCACGGATCCGGTCCAAGTACAACAACTACGCCACCTACTACGCTGAC |
| | | | | TCCGTGAAGGACAGATTCACCATCAGCCGGGACGACTCTAAGAACACCGCCTATCT |
| | | | | GCAGATGAACAACCTGAAAACCGAGGATACAGCTGTGTACTATTGTGTGCGGCACG |
| | | | | GCAACTTCGGCAACTCCTACATCTCCTACTGGGCCTATTGGGGACAGGGAACACTG |
| | | | | GTCACCGTGTCTAGCGGAGGTGGCGGAAGTGGGGGAGGCGGATCTGGCGGTGGC |
| | | | | GGATCCCAGACCGTGGTCACCCAGGAACCTTCCCTGACCGTCTCCCCAGGCGGCA |
| | | | | CCGTGACCCTGACCTGTGGCTCCTCTACCGGCGCTGTGACCTCCGGCAACTACCC |
| | | | | TAACTGGGTGCAGCAGAAACCCGGACAGGCTCCTAGAGGCCTGATCGGCGGCACC |
| | | | | AAGTTTCTGGCCCCTGGCACCCCTGCCAGATTCTCCGGCTCCCTGCTGGGAGGCA |
| | | | | AGGCCGCTCTGACCCTGTCTGGCGTGCAGCCTGAGGACGAGGCCGAGTACTACTG |
| | | | | TGTGCTGTGGTACTCCAACAGATGGGTGTTCGGAGGCGGCACAAAGCTGACCGTG |
| | | | | CTG |
| 823. | PM34C7-H | artificial | aa | EVQLLEQSGAELVKPGASVKLSCTASGFNIKDTYMDWVKQRPEQGLEWIARIDPANGD |
| | | | | SKYDPKFQGKATITADTSSNTAYLQLSSLTSEDTAVYYCARGGMIWYFDVWGQGTTVT |
| | | | | VSS |
| 824. | PM34C7-HCDR1 | artificial | aa | DTYMD |
| 825. | PM34C7-HCDR2 | artificial | aa | RIDPANGDSKYDPKFQG |
| 826. | PM34C7-HCDR3 | artificial | aa | GGMIWYFDV |
| 827. | PM34C7-H | artificial | nt | GAGGTGCAGCTGCTCGAGCAGTCTGGGGCAGAGCTTGTGAAGCCAGGGGCCTCA |
| | | | | GTCAAGTTGTCCTGCACAGCTTCTGGCTTCAACATTAAAGACACCTATATGGACTGG |
| | | | | GTGAAGCAGAGGCCTGAACAGGGCCTGGAATGGATTGCAAGGATTGATCCTGCGA |
| | | | | ATGGTGATAGTAAATATGACCCGAAATTCCAGGGCAAGGCCACTATAACAGCAGAC |
| | | | | ACATCCTCCAACACAGCCTACCTGCAGCTCAGCAGCCTGACATCTGAGGACACTGC |
| | | | | CGTCTATTATTGTGCTAGAGGCGGGATGATATGGTACTTCGATGTCTGGGGCCAAG |
| | | | | GGACCACGGTCACCGTCTCCTCA |
| 828. | PM34C7-L | artificial | aa | ELVLTQSPTTMAASPGEKITITCSASSSISSNYLHWYQQKPGFSPKLLIYRTSNLASGVP |
| | | | | ARFSGSGSGTSYSLTIGTMEAEDVATYYCQQGSSLPYTFGGGTKLEIK |
| 829. | PM34C7-LCDR1 | artificial | aa | SASSSISSNYLH |
| 830. | PM34C7-LCDR2 | artificial | aa | RTSNLAS |
| 831. | PM34C7-LCDR3 | artificial | aa | QQGSSLPYT |
| 832. | PM34C7-L | artificial | nt | GAGCTCGTGCTCACCCAGTCTCCAACCACCATGGCTGCATCTCCCGGGGAGAAGA |
| | | | | TCACTATCACCTGCAGTGCCAGCTCAAGTATAAGTTCCAATTACTTGCATTGGTATC |
| | | | | AGCAGAAGCCAGGATTCTCCCCTAAACTCTTGATTTATAGGACATCCAATCTGGCTT |
| | | | | CTGGAGTCCCAGCTCGCTTCAGTGGCAGTGGGTCTGGGACCTCTTACTCTCTCACA |
| | | | | ATTGGCACCATGGAGGCTGAAGATGTTGCCACTTACTACTGCCAGCAGGGTAGTAG |
| | | | | TTTACCGTACACGTTCGGAGGGGGGACCAAGCTTGAGATCAAA |
| 833. | PM34C7-HL | artificial | aa | EVQLLEQSGAELVKPGASVKLSCTASGFNIKDTYMDWVKQRPEQGLEWIARIDPANGD |
| | | | | SKYDPKFQGKATITADTSSNTAYLQLSSLTSEDTAVYYCARGGMIWYFDVWGQGTTVT |
| | | | | VSSGGGGSGGGGSGGGGSELVLTQSPTTMAASPGEKITITCSASSSISSNYLHWYQQK |
| | | | | PGFSPKLLIYRTSNLASGVPARFSGSGSGTSYSLTIGTMEAEDVATYYCQQGSSLPYTF |
| | | | | GGGTKLEIK |
| 834. | PM34C7-HL | artificial | nt | GAGGTGCAGCTGCTCGAGCAGTCTGGGGCAGAGCTTGTGAAGCCAGGGGCCTCA |
| | | | | GTCAAGTTGTCCTGCACAGCTTCTGGCTTCAACATTAAAGACACCTATATGGACTGG |
| | | | | GTGAAGCAGAGGCCTGAACAGGGCCTGGAATGGATTGCAAGGATTGATCCTGCGA |
| | | | | ATGGTGATAGTAAATATGACCCGAAATTCCAGGGCAAGGCCACTATAACAGCAGAC |
| | | | | ACATCCTCCAACACAGCCTACCTGCAGCTCAGCAGCCTGACATCTGAGGACACTGC |
| | | | | CGTCTATTATTGTGCTAGAGGCGGGATGATATGGTACTTCGATGTCTGGGGCCAAG |
| | | | | GGACCACGGTCACCGTCTCCTCAGGTGGTGGTGGTTCTGGCGGCGGCGGCTCCG |
| | | | | GTGGTGGTGGTTCTGAGCTCGTGCTCACCCAGTCTCCAACCACCATGGCTGCATCT |
| | | | | CCCGGGGAGAAGATCACTATCACCTGCAGTGCCAGCTCAAGTATAAGTTCCAATTA |
| | | | | CTTGCATTGGTATCAGCAGAAGCCAGGATTCTCCCCTAAACTCTTGATTTATAGGAC |
| | | | | ATCCAATCTGGCTTCTGGAGTCCCAGCTCGCTTCAGTGGCAGTGGGTCTGGGACCT |
| | | | | CTTACTCTCTCACAATTGGCACCATGGAGGCTGAAGATGTTGCCACTTACTACTGCC |
| | | | | AGCAGGGTAGTAGTTTACCGTACACGTTCGGAGGGGGGACCAAGCTTGAGATCAAA |
| 835. | PM34C7 | artificial | aa | EVQLLEQSGAELVKPGASVKLSCTASGFNIKDTYMDWVKQRPEQGLEWIARIDPANGD |
| | HL x I2C | | | SKYDPKFQGKATITADTSSNTAYLQLSSLTSEDTAVYYCARGGMIWYFDVWGQGTTVT |
| | HL | | | VSSGGGGSGGGGSGGGGSELVLTQSPTTMAASPGEKITITCSASSSISSNYLHWYQQK |
| | | | | PGFSPKLLIYRTSNLASGVPARFSGSGSGTSYSLTIGTMEAEDVATYYCQQGSSLPYTF |
| | | | | GGGTKLEIKSGGGGSEVQLVESGGGLVQPGGSLKLSCAASGFTFNKYAMNWVRQAPG |
| | | | | KGLEWVARIRSKYNNYATYYADSVKDRFTISRDDSKNTAYLQMNNLKTEDTAVYYCVR |
| | | | | HGNFGNSYISYWAYWGQGTLVTVSSGGGGSGGGGSGGGGSQTVVTQEPSLTVSPG |
| | | | | GTVTLTCGSSTGAVTSGNYPNWVQQKPGQAPRGLIGGTKFLAPGTPARFSGSLLGGK |
| | | | | AALTLSGVQPEDEAEYYCVLWYSNRWVFGGGTKLTVL |
| 836. | PM34C7 | artificial | nt | GAGGTGCAGCTGCTCGAGCAGTCTGGGGCAGAGCTTGTGAAGCCAGGGGCCTCA |
| | HL x I2C | | | GTCAAGTTGTCCTGCACAGCTTCTGGCTTCAACATTAAAGACACCTATATGGACTGG |
| | HL | | | GTGAAGCAGAGGCCTGAACAGGGCCTGGAATGGATTGCAAGGATTGATCCTGCGA |
| | | | | ATGGTGATAGTAAATATGACCCGAAATTCCAGGGCAAGGCCACTATAACAGCAGAC |
| | | | | ACATCCTCCAACACAGCCTACCTGCAGCTCAGCAGCCTGACATCTGAGGACACTGC |
| | | | | CGTCTATTATTGTGCTAGAGGCGGGATGATATGGTACTTCGATGTCTGGGGCCAAG |
| | | | | GGACCACGGTCACCGTCTCCTCAGGTGGTGGTGGTTCTGGCGGCGGCGGCTCCG |
| | | | | GTGGTGGTGGTTCTGAGCTCGTGCTCACCCAGTCTCCAACCACCATGGCTGCATCT |
| | | | | CCCGGGGAGAAGATCACTATCACCTGCAGTGCCAGCTCAAGTATAAGTTCCAATTA |
| | | | | CTTGCATTGGTATCAGCAGAAGCCAGGATTCTCCCCTAAACTCTTGATTTATAGGAC |
| | | | | ATCCAATCTGGCTTCTGGAGTCCCAGCTCGCTTCAGTGGCAGTGGGTCTGGGACCT |
| | | | | CTTACTCTCTCACAATTGGCACCATGGAGGCTGAAGATGTTGCCACTTACTACTGCC |
| | | | | AGCAGGGTAGTAGTTTACCGTACACGTTCGGAGGGGGGACCAAGCTTGAGATCAAA |
| | | | | TCCGGAGGTGGTGGATCCGAGGTGCAGCTGGTCGAGTCTGGAGGAGGATTGGTGC |
| | | | | AGCCTGGAGGGTCATTGAAACTCTCATGTGCAGCCTCTGGATTCACCTTCAATAAGT |
| | | | | ACGCCATGAACTGGGTCCGCCAGGCTCCAGGAAAGGGTTTGGAATGGGTTGCTCG |
| | | | | CATAAGAAGTAAATATAATAATTATGCAACATATTATGCCGATTCAGTGAAAGACAGG |
| | | | | TTCACCATCTCCAGAGATGATTCAAAAAACACTGCCTATCTACAAATGAACAACTTGA |
| | | | | AAACTGAGGACACTGCCGTGTACTACTGTGTGAGACATGGGAACTTCGGTAATAGC |
| | | | | TACATATCCTACTGGGCTTACTGGGGCCAAGGGACTCTGGTCACCGTCTCCTCAGG |
| | | | | TGGTGGTGGTTCTGGCGGCGGCGGCTCCGGTGGTGGTGGTTCTCAGACTGTTGTG |
| | | | | ACTCAGGAACCTTCACTCACCGTATCACCTGGTGGAACAGTCACACTCACTTGTGG |
| | | | | CTCCTCGACTGGGGCTGTTACATCTGGCAACTACCCAAACTGGGTCCAACAAAAAC |
| | | | | CAGGTCAGGCACCCCGTGGTCTAATAGGTGGGACTAAGTTCCTCGCCCCCGGTAC |
| | | | | TCCTGCCAGATTCTCAGGCTCCCTGCTTGGAGGCAAGGCTGCCCTCACCCTCTCAG |
| | | | | GGGTACAGCCAGAGGATGAGGCAGAATATTACTGTGTTCTATGGTACAGCAACCGC |
| | | | | TGGGTGTTCGGTGGAGGAACCAAACTGACTGTCCTA |
| 837. | PM49B9-H | artificial | aa | QVQLVQSGAEVKKPGASVKLSCKASGYTFTYFDINWVRQTPEQGLEWMGGISPGDGN |
| | | | | TNYNENFKGRVTMTRDTSNSTAYMELSRLRSDDTAVYYCARDGNFPYYAMDSWGQG |
| | | | | TTVTVSS |
| 838. | PM49B9-HCDR1 | artificial | aa | YFDIN |
| 839. | PM49B9-HCDR2 | artificial | aa | GISPGDGNTNYNENFKG |
| 840. | PM49B9-HCDR3 | artificial | aa | DGNFPYYAMDS |
| 841. | PM49B9-H | artificial | nt | CAGGTGCAGCTGGTCCAGTCTGGCGCCGAAGTGAAGAAGCCTGGCGCCTCCGTGA |
| | | | | AGCTGTCCTGCAAGGCCTCCGGCTACACCTTCACCTACTTCGACATCAACTGGGTG |
| | | | | CGGCAGACGCCTGAGCAGGGCCTGGAATGGATGGGCGGCATCTCCCCTGGCGAC |
| | | | | GGCAACACCAACTACAACGAGAACTTCAAGGGCAGGGTCACAATGACCAGAGACAC |
| | | | | GTCCAACTCCACCGCCTACATGGAGCTGTCCCGGCTGAGATCTGACGACACCGCC |
| | | | | GTGTACTACTGCGCCAGGGACGGCAACTTCCCTTACTACGCCATGGACTCTTGGGG |
| | | | | CCAGGGCACCACGGTCACCGTCTCCTCA |
| 842. | PM49B9-L | artificial | aa | DIVMTQTPLSLPVTLGDPASISCRSSQSLVYSNGNTYLNWYQQRPGQSPRLLIYKVSNR |
| | | | | FSGVPDRFSGSGSGTDFTLKISRVEAEDVGVYYCSQSTHVPYTFGQGTKLEIK |
| 843. | PM49B9-LCDR1 | artificial | aa | RSSQSLVYSNGNTYLN |
| 844. | PM49B9-LCDR2 | artificial | aa | KVSNRFS |
| 845. | PM49B9-LCDR3 | artificial | aa | SQSTHVPYT |
| 846. | PM49B9-L | artificial | nt | GACGTCGTGATGACTCAGACTCCACTCTCCCTGCCCGTCACCCTTGGAGACCCGG |
| | | | | CCTCCATCTCCTGCAGGTCTAGTCAAAGCCTCGTATACAGTAACGGAAACACCTACT |
| | | | | TGAATTGGTATCAACAGAGGCCAGGCCAATCTCCAAGACTCCTAATTTATAAGGTTT |
| | | | | CTAACCGGTTCTCTGGGGTCCCAGACAGATTCAGCGGCAGTGGGTCAGGCACTGA |
| | | | | TTTCACACTGAAAATCAGCAGGGTGGAGGCTGAGGATGTTGGGGTTTACTACTGCT |
| | | | | CTCAAAGTACACATGTTCCGTACACGTTTGGCCAGGGGACCAAGCTGGAGATCAAA |
| 847. | PM49B9-HL | artificial | aa | QVQLVQSGAEVKKPGASVKLSCKASGYTFTYFDINWVRQTPEQGLEWMGGISPGDGN |
| | | | | TNYNENFKGRVTMTRDTSNSTAYMELSRLRSDDTAVYYCARDGNFPYYAMDSWGQG |
| | | | | TTVTVSSGGGGSGGGGSGGGGSDIVMTQTPLSLPVTLGDPASISCRSSQSLVYSNGNT |
| | | | | YLNWYQQRPGQSPRLLIYKVSNRFSGVPDRFSGSGSGTDFTLKISRVEAEDVGVYYCS |
| | | | | QSTHVPYTFGQGTKLEIK |
| 848. | PM49B9-HL | artificial | nt | CAGGTGCAGCTGGTCCAGTCTGGCGCCGAAGTGAAGAAGCCTGGCGCCTCCGTGA |
| | | | | AGCTGTCCTGCAAGGCCTCCGGCTACACCTTCACCTACTTCGACATCAACTGGGTG |
| | | | | CGGCAGACGCCTGAGCAGGGCCTGGAATGGATGGGCGGCATCTCCCCTGGCGAC |
| | | | | GGCAACACCAACTACAACGAGAACTTCAAGGGCAGGGTCACAATGACCAGAGACAC |
| | | | | GTCCAACTCCACCGCCTACATGGAGCTGTCCCGGCTGAGATCTGACGACACCGCC |
| | | | | GTGTACTACTGCGCCAGGGACGGCAACTTCCCTTACTACGCCATGGACTCTTGGGG |
| | | | | CCAGGGCACCACGGTCACCGTCTCCTCAGGTGGTGGTGGTTCTGGCGGCGGCGG |
| | | | | CTCCGGTGGTGGTGGTTCTGACGTCGTGATGACTCAGACTCCACTCTCCCTGCCCG |
| | | | | TCACCCTTGGAGACCCGGCCTCCATCTCCTGCAGGTCTAGTCAAAGCCTCGTATAC |
| | | | | AGTAACGGAAACACCTACTTGAATTGGTATCAACAGAGGCCAGGCCAATCTCCAAG |
| | | | | ACTCCTAATTTATAAGGTTTCTAACCGGTTCTCTGGGGTCCCAGACAGATTCAGCGG |
| | | | | CAGTGGGTCAGGCACTGATTTCACACTGAAAATCAGCAGGGTGGAGGCTGAGGAT |
| | | | | GTTGGGGTTTACTACTGCTCTCAAAGTACACATGTTCCGTACACGTTTGGCCAGGG |
| | | | | GACCAAGCTGGAGATCAAA |
| 849. | PM49B9 | artificial | aa | QVQLVQSGAEVKKPGASVKLSCKASGYTFTYFDINWVRQTPEQGLEWMGGISPGDGN |
| | HL x I2C | | | TNYNENFKGRVTMTRDTSNSTAYMELSRLRSDDTAVYYCARDGNFPYYAMDSWGQG |
| | HL | | | TTVTVSSGGGGSGGGGSGGGGSDIVMTQTPLSLPVTLGDPASISCRSSQSLVYSNGNT |
| | | | | YLNWYQQRPGQSPRLLIYKVSNRFSGVPDRFSGSGSGTDFTLKISRVEAEDVGVYYCS |
| | | | | QSTHVPYTFGQGTKLEIKSGGGGSEVQLVESGGGLVQPGGSLKLSCAASGFTFNKYA |
| | | | | MNWVRQAPGKGLEWVARIRSKYNNYATYYADSVKDRFTISRDDSKNTAYLQMNNLKT |
| | | | | EDTAVYYCVRHGNFGNSYISYWAYWGQGTLVTVSSGGGGSGGGGSGGGGSQTVVT |
| | | | | QEPSLTVSPGGTVTLTCGSSTGAVTSGNYPNWVQQKPGQAPRGLIGGTKFLAPGTPA |
| | | | | RFSGSLLGGKAALTLSGVQPEDEAEYYCVLWYSNRWVFGGGTKLTVL |
| 850. | PM49B9 | artificial | nt | CAGGTGCAGCTGGTCCAGTCTGGCGCCGAAGTGAAGAAGCCTGGCGCCTCCGTGA |
| | HL x I2C | | | AGCTGTCCTGCAAGGCCTCCGGCTACACCTTCACCTACTTCGACATCAACTGGGTG |
| | HL | | | CGGCAGACGCCTGAGCAGGGCCTGGAATGGATGGGCGGCATCTCCCCTGGCGAC |
| | | | | GGCAACACCAACTACAACGAGAACTTCAAGGGCAGGGTCACAATGACCAGAGACAC |
| | | | | GTCCAACTCCACCGCCTACATGGAGCTGTCCCGGCTGAGATCTGACGACACCGCC |
| | | | | GTGTACTACTGCGCCAGGGACGGCAACTTCCCTTACTACGCCATGGACTCTTGGGG |
| | | | | CCAGGGCACCACGGTCACCGTCTCCTCAGGTGGTGGTGGTTCTGGCGGCGGCGG |
| | | | | CTCCGGTGGTGGTGGTTCTGACGTCGTGATGACTCAGACTCCACTCTCCCTGCCCG |
| | | | | TCACCCTTGGAGACCCGGCCTCCATCTCCTGCAGGTCTAGTCAAAGCCTCGTATAC |
| | | | | AGTAACGGAAACACCTACTTGAATTGGTATCAACAGAGGCCAGGCCAATCTCCAAG |
| | | | | ACTCCTAATTTATAAGGTTTCTAACCGGTTCTCTGGGGTCCCAGACAGATTCAGCGG |
| | | | | CAGTGGGTCAGGCACTGATTTCACACTGAAAATCAGCAGGGTGGAGGCTGAGGAT |
| | | | | GTTGGGGTTTACTACTGCTCTCAAAGTACACATGTTCCGTACACGTTTGGCCAGGG |
| | | | | GACCAAGCTGGAGATCAAATCCGGAGGTGGTGGATCCGAGGTGCAGCTGGTCGAG |
| | | | | TCTGGAGGAGGATTGGTGCAGCCTGGAGGGTCATTGAAACTCTCATGTGCAGCCTC |
| | | | | TGGATTCACCTTCAATAAGTACGCCATGAACTGGGTCCGCCAGGCTCCAGGAAAGG |
| | | | | GTTTGGAATGGGTTGCTCGCATAAGAAGTAAATATAATAATTATGCAACATATTATGC |
| | | | | CGATTCAGTGAAAGACAGGTTCACCATCTCCAGAGATGATTCAAAAAACACTGCCTA |
| | | | | TCTACAAATGAACAACTTGAAAACTGAGGACACTGCCGTGTACTACTGTGTGAGACA |
| | | | | TGGGAACTTCGGTAATAGCTACATATCCTACTGGGCTTACTGGGGCCAAGGGACTC |
| | | | | TGGTCACCGTCTCCTCAGGTGGTGGTGGTTCTGGCGGCGGCGGCTCCGGTGGTG |
| | | | | GTGGTTCTCAGACTGTTGTGACTCAGGAACCTTCACTCACCGTATCACCTGGTGGA |
| | | | | ACAGTCACACTCACTTGTGGCTCCTCGACTGGGGCTGTTACATCTGGCAACTACCC |
| | | | | AAACTGGGTCCAACAAAAACCAGGTCAGGCACCCCGTGGTCTAATAGGTGGGACTA |
| | | | | AGTTCCTCGCCCCCGGTACTCCTGCCAGATTCTCAGGCTCCCTGCTTGGAGGCAAG |
| | | | | GCTGCCCTCACCCTCTCAGGGGTACAGCCAGAGGATGAGGCAGAATATTACTGTGT |
| | | | | TCTATGGTACAGCAACCGCTGGGTGTTCGGTGGAGGAACCAAACTGACTGTCCTA |
| 851. | PM29G1-H | artificial | aa | QVQLVQSGAEVKKPGASVKLSCKASGYTFTYFDINWVRQTPEQGLEWMGGISPGDGN |
| | | | | TNYNENFKGRVTMTRDTSNSTAYMELSRLRSDDTAVYYCARDGNFPYYAMDSWGQG |
| | | | | TTVTVSS |
| 852. | PM29G1-HCDR1 | artificial | aa | YFDIN |
| 853. | PM29G1-HCDR2 | artificial | aa | GISPGDGNTNYNENFKG |
| 854. | PM29G1-HCDR3 | artificial | aa | DGNFPYYAMDS |
| 855. | PM29G1-H | artificial | nt | CAGGTGCAGCTGGTCCAGTCTGGCGCCGAAGTGAAGAAGCCTGGCGCCTCCGTGA |
| | | | | AGCTGTCCTGCAAGGCCTCCGGCTACACCTTCACCTACTTCGACATCAACTGGGTG |
| | | | | CGGCAGACGCCTGAGCAGGGCCTGGAATGGATGGGCGGCATCTCCCCTGGCGAC |
| | | | | GGCAACACCAACTACAACGAGAACTTCAAGGGCAGGGTCACAATGACCAGAGACAC |
| | | | | GTCCAACTCCACCGCCTACATGGAGCTGTCCCGGCTGAGATCTGACGACACCGCC |
| | | | | GTGTACTACTGCGCCAGGGACGGCAACTTCCCTTACTACGCCATGGACTCTTGGGG |
| | | | | CCAGGGCACCACGGTCACCGTCTCCTCA |
| 856. | PM29G1-L | artificial | aa | DVVMTQSPLSLPVTLGEPASISCRSSQSLVYSNGNTYLHWYQQKPGQSPRLLIYKVSN |
| | | | | RFSGVPDRFSGSGSGTDFTLKISRVEAEDVGVYFCSQSTHVPYTFGQGTKLEIK |
| 857. | PM29G1-LCDR1 | artificial | aa | RSSQSLVYSNGNTYLH |
| 858. | PM29G1-LCDR2 | artificial | aa | KVSNRFS |
| 859. | PM29G1-LCDR3 | artificial | aa | SQSTHVPYT |
| 860. | PM29G1-L | artificial | nt | GACGTCGTGATGACTCAGTCTCCACTCTCCCTGCCCGTCACCCTTGGAGAGCCGG |
| | | | | CCTCCATCTCCTGCAGGTCTAGTCAAAGCCTCGTATACAGTAACGGAAACACCTACT |
| | | | | TGCATTGGTATCAACAGAAGCCAGGCCAATCTCCAAGACTCCTAATTTATAAGGTTT |
| | | | | CTAACCGGTTCTCTGGGGTCCCAGACAGATTCAGCGGCAGTGGGTCAGGCACTGA |
| | | | | TTTCACACTGAAAATCAGCAGGGTGGAGGCTGAGGATGTTGGGGTTTATTTCTGCT |
| | | | | CTCAAAGTACACATGTTCCGTACACGTTTGGCCAGGGGACCAAGCTGGAGATCAAA |
| 861. | PM29G1-HL | artificial | aa | QVQLVQSGAEVKKPGASVKLSCKASGYTFTYFDINWVRQTPEQGLEWMGGISPGDGN |
| | | | | TNYNENFKGRVTMTRDTSNSTAYMELSRLRSDDTAVYYCARDGNFPYYAMDSWGQG |
| | | | | TTVTVSSGGGGSGGGGSGGGGSDVVMTQSPLSLPVTLGEPASISCRSSQSLVYSNGN |
| | | | | TYLHWYQQKPGQSPRLLIYKVSNRFSGVPDRFSGSGSGTDFTLKISRVEAEDVGVYFC |
| | | | | SQSTHVPYTFGQGTKLEIK |
| 862. | PM29G1-HL | artificial | nt | CAGGTGCAGCTGGTCCAGTCTGGCGCCGAAGTGAAGAAGCCTGGCGCCTCCGTGA |
| | | | | AGCTGTCCTGCAAGGCCTCCGGCTACACCTTCACCTACTTCGACATCAACTGGGTG |
| | | | | CGGCAGACGCCTGAGCAGGGCCTGGAATGGATGGGCGGCATCTCCCCTGGCGAC |
| | | | | GGCAACACCAACTACAACGAGAACTTCAAGGGCAGGGTCACAATGACCAGAGACAC |
| | | | | GTCCAACTCCACCGCCTACATGGAGCTGTCCCGGCTGAGATCTGACGACACCGCC |
| | | | | GTGTACTACTGCGCCAGGGACGGCAACTTCCCTTACTACGCCATGGACTCTTGGGG |
| | | | | CCAGGGCACCACGGTCACCGTCTCCTCAGGTGGTGGTGGTTCTGGCGGCGGCGG |
| | | | | CTCCGGTGGTGGTGGTTCTGACGTCGTGATGACTCAGTCTCCACTCTCCCTGCCCG |
| | | | | TCACCCTTGGAGAGCCGGCCTCCATCTCCTGCAGGTCTAGTCAAAGCCTCGTATAC |
| | | | | AGTAACGGAAACACCTACTTGCATTGGTATCAACAGAAGCCAGGCCAATCTCCAAG |
| | | | | ACTCCTAATTTATAAGGTTTCTAACCGGTTCTCTGGGGTCCCAGACAGATTCAGCGG |
| | | | | CAGTGGGTCAGGCACTGATTTCACACTGAAAATCAGCAGGGTGGAGGCTGAGGAT |
| | | | | GTTGGGGTTTATTTCTGCTCTCAAAGTACACATGTTCCGTACACGTTTGGCCAGGGG |
| | | | | ACCAAGCTGGAGATCAAA |
| 863. | PM29G1 | artificial | aa | QVQLVQSGAEVKKPGASVKLSCKASGYTFTYFDINWVRQTPEQGLEWMGGISPGDGN |
| | HL x I2C | | | TNYNENFKGRVTMTRDTSNSTAYMELSRLRSDDTAVYYCARDGNFPYYAMDSWGQG |
| | HL | | | TTVTVSSGGGGSGGGGSGGGGSDVVMTQSPLSLPVTLGEPASISCRSSQSLVYSNGN |
| | | | | TYLHWYQQKPGQSPRLLIYKVSNRFSGVPDRFSGSGSGTDFTLKISRVEAEDVGVYFC |
| | | | | SQSTHVPYTFGQGTKLEIKSGGGGSEVQLVESGGGLVQPGGSLKLSCAASGFTFNKYA |
| | | | | MNWVRQAPGKGLEWVARIRSKYNNYATYYADSVKDRFTISRDDSKNTAYLQMNNLKT |
| | | | | EDTAVYYCVRHGNFGNSYISYWAYWGQGTLVTVSSGGGGSGGGGSGGGGSQTVVT |
| | | | | QEPSLTVSPGGTVTLTCGSSTGAVTSGNYPNWVQQKPGQAPRGLIGGTKFLAPGTPA |
| | | | | RFSGSLLGGKAALTLSGVQPEDEAEYYCVLWYSNRWVFGGGTKLTVL |
| 864. | PM29G1 | artificial | nt | CAGGTGCAGCTGGTCCAGTCTGGCGCCGAAGTGAAGAAGCCTGGCGCCTCCGTGA |
| | HL x I2C | | | AGCTGTCCTGCAAGGCCTCCGGCTACACCTTCACCTACTTCGACATCAACTGGGTG |
| | HL | | | CGGCAGACGCCTGAGCAGGGCCTGGAATGGATGGGCGGCATCTCCCCTGGCGAC |
| | | | | GGCAACACCAACTACAACGAGAACTTCAAGGGCAGGGTCACAATGACCAGAGACAC |
| | | | | GTCCAACTCCACCGCCTACATGGAGCTGTCCCGGCTGAGATCTGACGACACCGCC |
| | | | | GTGTACTACTGCGCCAGGGACGGCAACTTCCCTTACTACGCCATGGACTCTTGGGG |
| | | | | CCAGGGCACCACGGTCACCGTCTCCTCAGGTGGTGGTGGTTCTGGCGGCGGCGG |
| | | | | CTCCGGTGGTGGTGGTTCTGACGTCGTGATGACTCAGTCTCCACTCTCCCTGCCCG |
| | | | | TCACCCTTGGAGAGCCGGCCTCCATCTCCTGCAGGTCTAGTCAAAGCCTCGTATAC |
| | | | | AGTAACGGAAACACCTACTTGCATTGGTATCAACAGAAGCCAGGCCAATCTCCAAG |
| | | | | ACTCCTAATTTATAAGGTTTCTAACCGGTTCTCTGGGGTCCCAGACAGATTCAGCGG |
| | | | | CAGTGGGTCAGGCACTGATTTCACACTGAAAATCAGCAGGGTGGAGGCTGAGGAT |
| | | | | GTTGGGGTTTATTTCTGCTCTCAAAGTACACATGTTCCGTACACGTTTGGCCAGGGG |
| | | | | ACCAAGCTGGAGATCAAATCCGGAGGTGGTGGATCCGAGGTGCAGCTGGTCGAGT |
| | | | | CTGGAGGAGGATTGGTGCAGCCTGGAGGGTCATTGAAACTCTCATGTGCAGCCTCT |
| | | | | GGATTCACCTTCAATAAGTACGCCATGAACTGGGTCCGCCAGGCTCCAGGAAAGGG |
| | | | | TTTGGAATGGGTTGCTCGCATAAGAAGTAAATATAATAATTATGCAACATATTATGCC |
| | | | | GATTCAGTGAAAGACAGGTTCACCATCTCCAGAGATGATTCAAAAAACACTGCCTAT |
| | | | | CTACAAATGAACAACTTGAAAACTGAGGACACTGCCGTGTACTACTGTGTGAGACAT |
| | | | | GGGAACTTCGGTAATAGCTACATATCCTACTGGGCTTACTGGGGCCAAGGGACTCT |
| | | | | GGTCACCGTCTCCTCAGGTGGTGGTGGTTCTGGCGGCGGCGGCTCCGGTGGTGG |
| | | | | TGGTTCTCAGACTGTTGTGACTCAGGAACCTTCACTCACCGTATCACCTGGTGGAA |
| | | | | CAGTCACACTCACTTGTGGCTCCTCGACTGGGGCTGTTACATCTGGCAACTACCCA |
| | | | | AACTGGGTCCAACAAAAACCAGGTCAGGCACCCCGTGGTCTAATAGGTGGGACTAA |
| | | | | GTTCCTCGCCCCCGGTACTCCTGCCAGATTCTCAGGCTCCCTGCTTGGAGGCAAG |
| | | | | GCTGCCCTCACCCTCTCAGGGGTACAGCCAGAGGATGAGGCAGAATATTACTGTGT |
| | | | | TCTATGGTACAGCAACCGCTGGGTGTTCGGTGGAGGAACCAAACTGACTGTCCTA |
| 865. | PM29G1-H | artificial | nt | CAGGTGCAGCTGGTCCAGTCAGGCGCCGAAGTGAAGAAACCTGGCGCCTCTGTGA |
| | codon | | | AGCTGTCCTGCAAGGCCTCCGGCTACACCTTCACCTACTTCGACATCAACTGGGTC |
| | optimized | | | CGCCAGACCCCTGAGCAGGGCCTGGAATGGATGGGCGGCATCTCCCCTGGCGAC |
| | | | | GGCAACACCAACTACAACGAGAACTTCAAGGGCAGAGTGACCATGACCAGGGACA |
| | | | | CCTCTAACTCCACCGCCTACATGGAACTGTCCCGGCTGAGATCCGACGACACCGCC |
| | | | | GTGTACTACTGCGCCAGGGACGGCAACTTCCCTTACTACGCCATGGACTCTTGGGG |
| | | | | CCAGGGCACCACCGTGACAGTGTCCTCT |
| 866. | PM29G1-L | artificial | nt | GATGTGGTCATGACCCAGTCCCCACTGTCCCTGCCTGTGACCCTGGGCGAGCCTG |
| | codon | | | CCTCCATCTCCTGCCGGTCCTCCCAGTCCCTGGTGTACTCCAACGGCAATACCTAC |
| | optimized | | | CTGCACTGGTATCAGCAGAAGCCTGGCCAGTCCCCTAGGCTGCTGATCTACAAGGT |
| | | | | GTCCAACCGGTTCTCCGGCGTGCCCGACAGATTCTCCGGCTCCGGCTCTGGCACC |
| | | | | GACTTCACACTGAAGATCTCCAGGGTGGAGGCTGAGGACGTGGGCGTGTACTTCT |
| | | | | GCTCCCAGTCCACCCACGTGCCCTACACCTTCGGACAGGGCACCAAGCTGGAAAT |
| | | | | CAAG |
| 867. | PM29G1-H | artificial | nt | CAGGTGCAGCTGGTCCAGTCAGGCGCCGAAGTGAAGAAACCTGGCGCCTCTGTGA |
| | codon | | | AGCTGTCCTGCAAGGCCTCCGGCTACACCTTCACCTACTTCGACATCAACTGGGTC |
| | optimized | | | CGCCAGACCCCTGAGCAGGGCCTGGAATGGATGGGCGGCATCTCCCCTGGCGAC |
| | | | | GGCAACACCAACTACAACGAGAACTTCAAGGGCAGAGTGACCATGACCAGGGACA |
| | | | | CCTCTAACTCCACCGCCTACATGGAACTGTCCCGGCTGAGATCCGACGACACCGCC |
| | | | | GTGTACTACTGCGCCAGGGACGGCAACTTCCCTTACTACGCCATGGACTCTTGGGG |
| | | | | CCAGGGCACCACCGTGACAGTGTCCTCTGGCGGCGGAGGAAGTGGAGGTGGAGG |
| | | | | ATCTGGCGGAGGCGGCTCCGATGTGGTCATGACCCAGTCCCCACTGTCCCTGCCT |
| | | | | GTGACCCTGGGCGAGCCTGCCTCCATCTCCTGCCGGTCCTCCCAGTCCCTGGTGT |
| | | | | ACTCCAACGGCAATACCTACCTGCACTGGTATCAGCAGAAGCCTGGCCAGTCCCCT |
| | | | | AGGCTGCTGATCTACAAGGTGTCCAACCGGTTCTCCGGCGTGCCCGACAGATTCTC |
| | | | | CGGCTCCGGCTCTGGCACCGACTTCACACTGAAGATCTCCAGGGTGGAGGCTGAG |
| | | | | GACGTGGGCGTGTACTTCTGCTCCCAGTCCACCCACGTGCCCTACACCTTCGGACA |
| | | | | GGGCACCAAGCTGGAAATCAAG |
| 868. | PM29G1 | artificial | nt | CAGGTGCAGCTGGTCCAGTCAGGCGCCGAAGTGAAGAAACCTGGCGCCTCTGTGA |
| | HL x I2C | | | AGCTGTCCTGCAAGGCCTCCGGCTACACCTTCACCTACTTCGACATCAACTGGGTC |
| | HL codon | | | CGCCAGACCCCTGAGCAGGGCCTGGAATGGATGGGCGGCATCTCCCCTGGCGAC |
| | optimized | | | GGCAACACCAACTACAACGAGAACTTCAAGGGCAGAGTGACCATGACCAGGGACA |
| | | | | CCTCTAACTCCACCGCCTACATGGAACTGTCCCGGCTGAGATCCGACGACACCGCC |
| | | | | GTGTACTACTGCGCCAGGGACGGCAACTTCCCTTACTACGCCATGGACTCTTGGGG |
| | | | | CCAGGGCACCACCGTGACAGTGTCCTCTGGCGGCGGAGGAAGTGGAGGTGGAGG |
| | | | | ATCTGGCGGAGGCGGCTCCGATGTGGTCATGACCCAGTCCCCACTGTCCCTGCCT |
| | | | | GTGACCCTGGGCGAGCCTGCCTCCATCTCCTGCCGGTCCTCCCAGTCCCTGGTGT |
| | | | | ACTCCAACGGCAATACCTACCTGCACTGGTATCAGCAGAAGCCTGGCCAGTCCCCT |
| | | | | AGGCTGCTGATCTACAAGGTGTCCAACCGGTTCTCCGGCGTGCCCGACAGATTCTC |
| | | | | CGGCTCCGGCTCTGGCACCGACTTCACACTGAAGATCTCCAGGGTGGAGGCTGAG |
| | | | | GACGTGGGCGTGTACTTCTGCTCCCAGTCCACCCACGTGCCCTACACCTTCGGACA |
| | | | | GGGCACCAAGCTGGAAATCAAGTCTGGCGGAGGGGGCTCTGAAGTGCAGCTGGTG |
| | | | | GAAAGCGGAGGGGGACTGGTGCAGCCCGGGGGAAGTCTGAAGCTGTCCTGTGCC |
| | | | | GCCAGCGGCTTTACCTTCAACAAGTACGCCATGAATTGGGTCCGACAGGCCCCAG |
| | | | | GGAAAGGCCTGGAATGGGTGGCACGGATCCGGTCCAAGTACAACAACTACGCCAC |
| | | | | CTACTACGCTGACTCCGTGAAGGACAGATTCACCATCAGCCGGGACGACTCTAAGA |
| | | | | ACACCGCCTATCTGCAGATGAACAACCTGAAAACCGAGGATACAGCTGTGTACTATT |
| | | | | GTGTGCGGCACGGCAACTTCGGCAACTCCTACATCTCCTACTGGGCCTATTGGGGA |
| | | | | CAGGGAACACTGGTCACCGTGTCTAGCGGAGGTGGCGGAAGTGGGGGAGGCGGA |
| | | | | TCTGGCGGTGGCGGATCCCAGACCGTGGTCACCCAGGAACCTTCCCTGACCGTCT |
| | | | | CCCCAGGCGGCACCGTGACCCTGACCTGTGGCTCCTCTACCGGCGCTGTGACCTC |
| | | | | CGGCAACTACCCTAACTGGGTGCAGCAGAAACCCGGACAGGCTCCTAGAGGCCTG |
| | | | | ATCGGCGGCACCAAGTTTCTGGCCCCTGGCACCCCTGCCAGATTCTCCGGCTCCC |
| | | | | TGCTGGGAGGCAAGGCCGCTCTGACCCTGTCTGGCGTGCAGCCTGAGGACGAGG |
| | | | | CCGAGTACTACTGTGTGCTGTGGTACTCCAACAGATGGGTGTTCGGAGGCGGCAC |
| | | | | AAAGCTGACCGTGCTG |
| 869. | PM08B6-H | artificial | aa | QVQLVQSGAEVMKPGASVKVSCKASGYTITDTYMDWVRQAPGQGLEWIARIDPANGD |
| | | | | SKYDPKFQGRVTMTADTSTNTVYMELSSLRSEDTAVYYCARGGMIWYFDVWGQGTTV |
| | | | | TVSS |
| 870. | PM08B6-HCDR1 | artificial | aa | DTYMD |
| 871. | PM08B6-HCDR2 | artificial | aa | RIDPANGDSKYDPKFQG |
| 872. | PM08B6-HCDR3 | artificial | aa | GGMIWYFDV |
| 873. | PM08B6-H | artificial | nt | CAGGTGCAGCTGGTCCAGTCTGGGGCAGAGGTTATGAAACCAGGGGCCTCAGTCA |
| | | | | AGGTGTCCTGCAAAGCTTCTGGCTACACCATTACAGACACCTATATGGACTGGGTG |
| | | | | AGGCAGGCGCCTGGACAGGGCCTGGAATGGATTGCAAGGATTGATCCTGCGAATG |
| | | | | GTGATAGTAAATATGACCCGAAATTCCAGGGCAGGGTCACTATGACAGCAGACACA |
| | | | | TCCACCAACACAGTCTACATGGAGCTCAGCAGCCTGAGATCTGAGGACACTGCCGT |
| | | | | CTATTATTGTGCTAGAGGCGGGATGATATGGTACTTCGATGTCTGGGGCCAAGGGA |
| | | | | CCACGGTCACCGTCTCCTCA |
| 874. | PM08B6-L | artificial | aa | EIVLTQSPATLAVSPGEKVTLSCSASSSISSNYLHWYQQKPGLPPRLLIYRTSNLASGVP |
| | | | | DRFSGSGSGTDFTLTISRLEPEDFATYYCQQGSSLPYTFGQGTKLEIK |
| 875. | PM08B6-LCDR1 | artificial | aa | SASSSISSNYLH |
| 876. | PM08B6-LCDR2 | artificial | aa | RTSNLAS |
| 877. | PM08B6-LCDR3 | artificial | aa | QQGSSLPYT |
| 878. | PM08B6-L | artificial | nt | GAGATCGTGCTCACCCAGTCTCCAGCCACCCTGGCTGTATCTCCCGGGGAGAAGG |
| | | | | TCACTCTCTCCTGCAGTGCCAGCTCAAGTATAAGTTCCAATTACTTGCATTGGTATC |
| | | | | AGCAGAAGCCAGGATTGCCCCCTAGACTCTTGATTTATAGGACATCCAATCTGGCTT |
| | | | | CTGGAGTCCCAGATCGCTTCAGTGGCAGTGGGTCTGGGACCGATTTCACTCTCACA |
| | | | | ATTAGCAGGCTGGAGCCTGAAGATTTTGCCACTTACTACTGCCAGCAGGGTAGTAG |
| | | | | TTTACCGTACACGTTCGGACAAGGGACCAAGCTTGAGATCAAA |
| 879. | PM08B6-HL | artificial | aa | QVQLVQSGAEVMKPGASVKVSCKASGYTITDTYMDWVRQAPGQGLEWIARIDPANGD |
| | | | | SKYDPKFQGRVTMTADTSTNTVYMELSSLRSEDTAVYYCARGGMIWYFDVWGQGTTV |
| | | | | TVSSGGGGSGGGGSGGGGSEIVLTQSPATLAVSPGEKVTLSCSASSSISSNYLHWYQ |
| | | | | QKPGLPPRLLIYRTSNLASGVPDRFSGSGSGTDFTLTISRLEPEDFATYYCQQGSSLPY |
| | | | | TFGQGTKLEIK |
| 880. | PM08B6-HL | artificial | nt | CAGGTGCAGCTGGTCCAGTCTGGGGCAGAGGTTATGAAACCAGGGGCCTCAGTCA |
| | | | | AGGTGTCCTGCAAAGCTTCTGGCTACACCATTACAGACACCTATATGGACTGGGTG |
| | | | | AGGCAGGCGCCTGGACAGGGCCTGGAATGGATTGCAAGGATTGATCCTGCGAATG |
| | | | | GTGATAGTAAATATGACCCGAAATTCCAGGGCAGGGTCACTATGACAGCAGACACA |
| | | | | TCCACCAACACAGTCTACATGGAGCTCAGCAGCCTGAGATCTGAGGACACTGCCGT |
| | | | | CTATTATTGTGCTAGAGGCGGGATGATATGGTACTTCGATGTCTGGGGCCAAGGGA |
| | | | | CCACGGTCACCGTCTCCTCAGGTGGTGGTGGTTCTGGCGGCGGCGGCTCCGGTG |
| | | | | GTGGTGGTTCTGAGATCGTGCTCACCCAGTCTCCAGCCACCCTGGCTGTATCTCCC |
| | | | | GGGGAGAAGGTCACTCTCTCCTGCAGTGCCAGCTCAAGTATAAGTTCCAATTACTT |
| | | | | GCATTGGTATCAGCAGAAGCCAGGATTGCCCCCTAGACTCTTGATTTATAGGACATC |
| | | | | CAATCTGGCTTCTGGAGTCCCAGATCGCTTCAGTGGCAGTGGGTCTGGGACCGATT |
| | | | | TCACTCTCACAATTAGCAGGCTGGAGCCTGAAGATTTTGCCACTTACTACTGCCAGC |
| | | | | AGGGTAGTAGTTTACCGTACACGTTCGGACAAGGGACCAAGCTTGAGATCAAA |
| 881. | PM08B6 | artificial | aa | QVQLVQSGAEVMKPGASVKVSCKASGYTITDTYMDWVRQAPGQGLEWIARIDPANGD |
| | HL X I2C | | | SKYDPKFQGRVTMTADTSTNTVYMELSSLRSEDTAVYYCARGGMIWYFDVWGQGTTV |
| | HL | | | TVSSGGGGSGGGGSGGGGSEIVLTQSPATLAVSPGEKVTLSCSASSSISSNYLHWYQ |
| | | | | QKPGLPPRLLIYRTSNLASGVPDRFSGSGSGTDFTLTISRLEPEDFATYYCQQGSSLPY |
| | | | | TFGQGTKLEIKSGGGGSEVQLVESGGGLVQPGGSLKLSCAASGFTFNKYAMNWVRQA |
| | | | | PGKGLEWVARIRSKYNNYATYYADSVKDRFTISRDDSKNTAYLQMNNLKTEDTAVYYC |
| | | | | VRHGNFGNSYISYWAYWGQGTLVTVSSGGGGSGGGGSGGGGSQTVVTQEPSLTVSP |
| | | | | GGTVTLTCGSSTGAVTSGNYPNWVQQKPGQAPRGLIGGTKFLAPGTPARFSGSLLGG |
| | | | | KAALTLSGVQPEDEAEYYCVLWYSNRWVFGGGTKLTVL |
| 882. | PM08B6 | artificial | nt | CAGGTGCAGCTGGTCCAGTCTGGGGCAGAGGTTATGAAACCAGGGGCCTCAGTCA |
| | HL X I2C | | | AGGTGTCCTGCAAAGCTTCTGGCTACACCATTACAGACACCTATATGGACTGGGTG |
| | HL | | | AGGCAGGCGCCTGGACAGGGCCTGGAATGGATTGCAAGGATTGATCCTGCGAATG |
| | | | | GTGATAGTAAATATGACCCGAAATTCCAGGGCAGGGTCACTATGACAGCAGACACA |
| | | | | TCCACCAACACAGTCTACATGGAGCTCAGCAGCCTGAGATCTGAGGACACTGCCGT |
| | | | | CTATTATTGTGCTAGAGGCGGGATGATATGGTACTTCGATGTCTGGGGCCAAGGGA |
| | | | | CCACGGTCACCGTCTCCTCAGGTGGTGGTGGTTCTGGCGGCGGCGGCTCCGGTG |
| | | | | GTGGTGGTTCTGAGATCGTGCTCACCCAGTCTCCAGCCACCCTGGCTGTATCTCCC |
| | | | | GGGGAGAAGGTCACTCTCTCCTGCAGTGCCAGCTCAAGTATAAGTTCCAATTACTT |
| | | | | GCATTGGTATCAGCAGAAGCCAGGATTGCCCCCTAGACTCTTGATTTATAGGACATC |
| | | | | CAATCTGGCTTCTGGAGTCCCAGATCGCTTCAGTGGCAGTGGGTCTGGGACCGATT |
| | | | | TCACTCTCACAATTAGCAGGCTGGAGCCTGAAGATTTTGCCACTTACTACTGCCAGC |
| | | | | AGGGTAGTAGTTTACCGTACACGTTCGGACAAGGGACCAAGCTTGAGATCAAATCC |
| | | | | GGAGGTGGTGGATCCGAGGTGCAGCTGGTCGAGTCTGGAGGAGGATTGGTGCAG |
| | | | | CCTGGAGGGTCATTGAAACTCTCATGTGCAGCCTCTGGATTCACCTTCAATAAGTAC |
| | | | | GCCATGAACTGGGTCCGCCAGGCTCCAGGAAAGGGTTTGGAATGGGTTGCTCGCA |
| | | | | TAAGAAGTAAATATAATAATTATGCAACATATTATGCCGATTCAGTGAAAGACAGGTT |
| | | | | CACCATCTCCAGAGATGATTCAAAAAACACTGCCTATCTACAAATGAACAACTTGAA |
| | | | | AACTGAGGACACTGCCGTGTACTACTGTGTGAGACATGGGAACTTCGGTAATAGCT |
| | | | | ACATATCCTACTGGGCTTACTGGGGCCAAGGGACTCTGGTCACCGTCTCCTCAGGT |
| | | | | GGTGGTGGTTCTGGCGGCGGCGGCTCCGGTGGTGGTGGTTCTCAGACTGTTGTGA |
| | | | | CTCAGGAACCTTCACTCACCGTATCACCTGGTGGAACAGTCACACTCACTTGTGGC |
| | | | | TCCTCGACTGGGGCTGTTACATCTGGCAACTACCCAAACTGGGTCCAACAAAAACC |
| | | | | AGGTCAGGCACCCCGTGGTCTAATAGGTGGGACTAAGTTCCTCGCCCCCGGTACT |
| | | | | CCTGCCAGATTCTCAGGCTCCCTGCTTGGAGGCAAGGCTGCCCTCACCCTCTCAG |
| | | | | GGGTACAGCCAGAGGATGAGGCAGAATATTACTGTGTTCTATGGTACAGCAACCGC |
| | | | | TGGGTGTTCGGTGGAGGAACCAAACTGACTGTCCTA |
| 883. | PM08B6-H | artificial | nt | CAGGTGCAGCTGGTCCAGTCTGGCGCCGAAGTGATGAAGCCTGGCGCCTCCGTGA |
| | codon | | | AGGTGTCCTGCAAGGCCTCCGGCTACACCATCACCGACACCTACATGGACTGGGT |
| | optimized | | | GCGGCAGGCTCCTGGACAGGGCCTGGAATGGATCGCCCGGATCGACCCTGCCAA |
| | | | | CGGCGACTCCAAGTACGACCCTAAGTTCCAGGGCAGAGTGACCATGACCGCCGAC |
| | | | | ACCTCCACCAACACCGTGTACATGGAACTGTCCTCCCTGCGGTCTGAGGACACCGC |
| | | | | CGTGTACTACTGCGCCAGGGGCGGCATGATCTGGTACTTCGACGTGTGGGGCCAG |
| | | | | GGCACCACCGTGACAGTGTCCTCT |
| 884. | PM08B6-L | artificial | nt | GAGATCGTGCTGACCCAGTCTCCTGCCACCCTGGCTGTGTCTCCCGGCGAGAAAG |
| | codon | | | TGACCCTGTCCTGCTCCGCCTCCTCCTCCATCTCCTCCAACTACCTGCACTGGTATC |
| | optimized | | | AGCAGAAGCCTGGCCTGCCTCCTCGGCTGCTGATCTACCGGACCTCCAACCTGGC |
| | | | | CTCTGGCGTGCCCGACAGGTTCTCCGGCTCTGGCTCCGGCACCGACTTCACCCTG |
| | | | | ACCATCTCCCGGCTGGAACCTGAGGACTTCGCCACCTACTACTGCCAGCAGGGCT |
| | | | | CCTCCCTGCCTTACACCTTCGGACAGGGCACCAAGCTGGAAATCAAG |
| 885. | PM08B6-HL | artificial | nt | CAGGTGCAGCTGGTCCAGTCTGGCGCCGAAGTGATGAAGCCTGGCGCCTCCGTGA |
| | codon | | | AGGTGTCCTGCAAGGCCTCCGGCTACACCATCACCGACACCTACATGGACTGGGT |
| | optimized | | | GCGGCAGGCTCCTGGACAGGGCCTGGAATGGATCGCCCGGATCGACCCTGCCAA |
| | | | | CGGCGACTCCAAGTACGACCCTAAGTTCCAGGGCAGAGTGACCATGACCGCCGAC |
| | | | | ACCTCCACCAACACCGTGTACATGGAACTGTCCTCCCTGCGGTCTGAGGACACCGC |
| | | | | CGTGTACTACTGCGCCAGGGGCGGCATGATCTGGTACTTCGACGTGTGGGGCCAG |
| | | | | GGCACCACCGTGACAGTGTCCTCTGGCGGCGGAGGAAGTGGAGGTGGAGGATCT |
| | | | | GGTGGAGGCGGCTCCGAGATCGTGCTGACCCAGTCTCCTGCCACCCTGGCTGTGT |
| | | | | CTCCCGGCGAGAAAGTGACCCTGTCCTGCTCCGCCTCCTCCTCCATCTCCTCCAAC |
| | | | | TACCTGCACTGGTATCAGCAGAAGCCTGGCCTGCCTCCTCGGCTGCTGATCTACCG |
| | | | | GACCTCCAACCTGGCCTCTGGCGTGCCCGACAGGTTCTCCGGCTCTGGCTCCGGC |
| | | | | ACCGACTTCACCCTGACCATCTCCCGGCTGGAACCTGAGGACTTCGCCACCTACTA |
| | | | | CTGCCAGCAGGGCTCCTCCCTGCCTTACACCTTCGGACAGGGCACCAAGCTGGAA |
| | | | | ATCAAG |
| 886. | PM08B6 | artificial | nt | CAGGTGCAGCTGGTCCAGTCTGGCGCCGAAGTGATGAAGCCTGGCGCCTCCGTGA |
| | HL x I2C | | | AGGTGTCCTGCAAGGCCTCCGGCTACACCATCACCGACACCTACATGGACTGGGT |
| | HL codon | | | GCGGCAGGCTCCTGGACAGGGCCTGGAATGGATCGCCCGGATCGACCCTGCCAA |
| | optimized | | | CGGCGACTCCAAGTACGACCCTAAGTTCCAGGGCAGAGTGACCATGACCGCCGAC |
| | | | | ACCTCCACCAACACCGTGTACATGGAACTGTCCTCCCTGCGGTCTGAGGACACCGC |
| | | | | CGTGTACTACTGCGCCAGGGGCGGCATGATCTGGTACTTCGACGTGTGGGGCCAG |
| | | | | GGCACCACCGTGACAGTGTCCTCTGGCGGCGGAGGAAGTGGAGGTGGAGGATCT |
| | | | | GGTGGAGGCGGCTCCGAGATCGTGCTGACCCAGTCTCCTGCCACCCTGGCTGTGT |
| | | | | CTCCCGGCGAGAAAGTGACCCTGTCCTGCTCCGCCTCCTCCTCCATCTCCTCCAAC |
| | | | | TACCTGCACTGGTATCAGCAGAAGCCTGGCCTGCCTCCTCGGCTGCTGATCTACCG |
| | | | | GACCTCCAACCTGGCCTCTGGCGTGCCCGACAGGTTCTCCGGCTCTGGCTCCGGC |
| | | | | ACCGACTTCACCCTGACCATCTCCCGGCTGGAACCTGAGGACTTCGCCACCTACTA |
| | | | | CTGCCAGCAGGGCTCCTCCCTGCCTTACACCTTCGGACAGGGCACCAAGCTGGAA |
| | | | | ATCAAGTCTGGCGGAGGGGGCTCTGAAGTGCAGCTGGTGGAAAGCGGAGGGGGA |
| | | | | CTGGTGCAGCCCGGGGGAAGTCTGAAGCTGTCCTGTGCCGCCAGCGGCTTTACCT |
| | | | | TCAACAAGTACGCCATGAATTGGGTCCGACAGGCCCCAGGGAAAGGCCTGGAATG |
| | | | | GGTGGCACGGATCCGGTCCAAGTACAACAACTACGCCACCTACTACGCTGACTCCG |
| | | | | TGAAGGACAGATTCACCATCAGCCGGGACGACTCTAAGAACACCGCCTATCTGCAG |
| | | | | ATGAACAACCTGAAAACCGAGGATACAGCTGTGTACTATTGTGTGCGGCACGGCAA |
| | | | | CTTCGGCAACTCCTACATCTCCTACTGGGCCTATTGGGGACAGGGAACACTGGTCA |
| | | | | CCGTGTCTAGCGGAGGTGGCGGAAGTGGGGGAGGCGGATCTGGCGGTGGCGGAT |
| | | | | CCCAGACCGTGGTCACCCAGGAACCTTCCCTGACCGTCTCCCCAGGCGGCACCGT |
| | | | | GACCCTGACCTGTGGCTCCTCTACCGGCGCTGTGACCTCCGGCAACTACCCTAACT |
| | | | | GGGTGCAGCAGAAACCCGGACAGGCTCCTAGAGGCCTGATCGGCGGCACCAAGTT |
| | | | | TCTGGCCCCTGGCACCCCTGCCAGATTCTCCGGCTCCCTGCTGGGAGGCAAGGCC |
| | | | | GCTCTGACCCTGTCTGGCGTGCAGCCTGAGGACGAGGCCGAGTACTACTGTGTGC |
| | | | | TGTGGTACTCCAACAGATGGGTGTTCGGAGGCGGCACAAAGCTGACCGTGCTG |
| 887. | PM08E11-H | artificial | aa | QVQLVQSGAEVMKPGASVKVSCKASGYTITDTYMDWVRQAPGQGLEWIARIDPANGD |
| | | | | SKYDPKFQGRVTMTADTSTNTVYMELSSLRSEDTAVYYCARGGMIWYFDVWGQGTTV |
| | | | | TVSS |
| 888. | PM08E11-HCDR1 | artificial | aa | DTYMD |
| 889. | PM08E11-HCDR2 | artificial | aa | RIDPANGDSKYDPKFQG |
| 890. | PM08E11-HCDR3 | artificial | aa | GGMIWYFDV |
| 891. | PM08E11-H | artificial | nt | CAGGTGCAGCTGGTCCAGTCTGGGGCAGAGGTTATGAAACCAGGGGCCTCAGTCA |
| | | | | AGGTGTCCTGCAAAGCTTCTGGCTACACCATTACAGACACCTATATGGACTGGGTG |
| | | | | AGGCAGGCGCCTGGACAGGGCCTGGAATGGATTGCAAGGATTGATCCTGCGAATG |
| | | | | GTGATAGTAAATATGACCCGAAATTCCAGGGCAGGGTCACTATGACAGCAGACACA |
| | | | | TCCACCAACACAGTCTACATGGAGCTCAGCAGCCTGAGATCTGAGGACACTGCCGT |
| | | | | CTATTATTGTGCTAGAGGCGGGATGATATGGTACTTCGATGTCTGGGGCCAAGGGA |
| | | | | CCACGGTCACCGTCTCCTCA |
| 892. | PM08E11-L | artificial | aa | EIVLTQSPATMSVSPGERATLSCSASSSISSNYLHWYQQKPGLPPRLLIYRTSNLASGIP |
| | | | | DRFSGSGSGTDFTLTISRLEAEDFATYYCQQGSSLPYTFGQGTKLEIK |
| 893. | PM08E11-LCDR1 | artificial | aa | SASSSISSNYLH |
| 894. | PM08E11-LCDR2 | artificial | aa | RTSNLAS |
| 895. | PM08E11-LCDR3 | artificial | aa | QQGSSLPYT |
| 896. | PM08E11-L | artificial | nt | GAGATCGTGCTCACCCAGTCTCCAGCCACCATGTCTGTATCTCCCGGGGAGAGGG |
| | | | | CCACTCTCTCCTGCAGTGCCAGCTCAAGTATAAGTTCCAATTACTTGCATTGGTATC |
| | | | | AGCAGAAGCCAGGATTGCCCCCTAGACTCTTGATTTATAGGACATCCAATCTGGCTT |
| | | | | CTGGAATCCCAGATCGCTTCAGTGGCAGTGGGTCTGGGACCGATTTCACTCTCACA |
| | | | | ATTAGCAGGCTGGAGGCTGAAGATTTTGCCACTTACTACTGCCAGCAGGGTAGTAG |
| | | | | TTTACCGTACACGTTCGGACAAGGGACCAAGCTTGAGATCAAA |
| 897. | PM08E11-HL | artificial | aa | QVQLVQSGAEVMKPGASVKVSCKASGYTITDTYMDWVRQAPGQGLEWIARIDPANGD |
| | | | | SKYDPKFQGRVTMTADTSTNTVYMELSSLRSEDTAVYYCARGGMIWYFDVWGQGTTV |
| | | | | TVSSGGGGSGGGGSGGGGSEIVLTQSPATMSVSPGERATLSCSASSSISSNYLHWYQ |
| | | | | QKPGLPPRLLIYRTSNLASGIPDRFSGSGSGTDFTLTISRLEAEDFATYYCQQGSSLPYT |
| | | | | FGQGTKLEIK |
| 898. | PM08E11-HL | artificial | nt | CAGGTGCAGCTGGTCCAGTCTGGGGCAGAGGTTATGAAACCAGGGGCCTCAGTCA |
| | | | | AGGTGTCCTGCAAAGCTTCTGGCTACACCATTACAGACACCTATATGGACTGGGTG |
| | | | | AGGCAGGCGCCTGGACAGGGCCTGGAATGGATTGCAAGGATTGATCCTGCGAATG |
| | | | | GTGATAGTAAATATGACCCGAAATTCCAGGGCAGGGTCACTATGACAGCAGACACA |
| | | | | TCCACCAACACAGTCTACATGGAGCTCAGCAGCCTGAGATCTGAGGACACTGCCGT |
| | | | | CTATTATTGTGCTAGAGGCGGGATGATATGGTACTTCGATGTCTGGGGCCAAGGGA |
| | | | | CCACGGTCACCGTCTCCTCAGGTGGTGGTGGTTCTGGCGGCGGCGGCTCCGGTG |
| | | | | GTGGTGGTTCTGAGATCGTGCTCACCCAGTCTCCAGCCACCATGTCTGTATCTCCC |
| | | | | GGGGAGAGGGCCACTCTCTCCTGCAGTGCCAGCTCAAGTATAAGTTCCAATTACTT |
| | | | | GCATTGGTATCAGCAGAAGCCAGGATTGCCCCCTAGACTCTTGATTTATAGGACATC |
| | | | | CAATCTGGCTTCTGGAATCCCAGATCGCTTCAGTGGCAGTGGGTCTGGGACCGATT |
| | | | | TCACTCTCACAATTAGCAGGCTGGAGGCTGAAGATTTTGCCACTTACTACTGCCAGC |
| | | | | AGGGTAGTAGTTTACCGTACACGTTCGGACAAGGGACCAAGCTTGAGATCAAA |
| 899. | PM08E11 | artificial | aa | QVQLVQSGAEVMKPGASVKVSCKASGYTITDTYMDWVRQAPGQGLEWIARIDPANGD |
| | HL X I2C | | | SKYDPKFQGRVTMTADTSTNTVYMELSSLRSEDTAVYYCARGGMIWYFDVWGQGTTV |
| | HL | | | TVSSGGGGSGGGGSGGGGSEIVLTQSPATMSVSPGERATLSCSASSSISSNYLHWYQ |
| | | | | QKPGLPPRLLIYRTSNLASGIPDRFSGSGSGTDFTLTISRLEAEDFATYYCQQGSSLPYT |
| | | | | FGQGTKLEIKSGGGGSEVQLVESGGGLVQPGGSLKLSCAASGFTFNKYAMNWVRQAP |
| | | | | GKGLEWVARIRSKYNNYATYYADSVKDRFTISRDDSKNTAYLQMNNLKTEDTAVYYCV |
| | | | | RHGNFGNSYISYWAYWGQGTLVTVSSGGGGSGGGGSGGGGSQTVVTQEPSLTVSPG |
| | | | | GTVTLTCGSSTGAVTSGNYPNWVQQKPGQAPRGLIGGTKFLAPGTPARFSGSLLGGK |
| | | | | AALTLSGVQPEDEAEYYCVLWYSNRWVFGGGTKLTVL |
| 900. | PM08E11 | artificial | nt | CAGGTGCAGCTGGTCCAGTCTGGGGCAGAGGTTATGAAACCAGGGGCCTCAGTCA |
| | HL X I2C | | | AGGTGTCCTGCAAAGCTTCTGGCTACACCATTACAGACACCTATATGGACTGGGTG |
| | HL | | | AGGCAGGCGCCTGGACAGGGCCTGGAATGGATTGCAAGGATTGATCCTGCGAATG |
| | | | | GTGATAGTAAATATGACCCGAAATTCCAGGGCAGGGTCACTATGACAGCAGACACA |
| | | | | TCCACCAACACAGTCTACATGGAGCTCAGCAGCCTGAGATCTGAGGACACTGCCGT |
| | | | | CTATTATTGTGCTAGAGGCGGGATGATATGGTACTTCGATGTCTGGGGCCAAGGGA |
| | | | | CCACGGTCACCGTCTCCTCAGGTGGTGGTGGTTCTGGCGGCGGCGGCTCCGGTG |
| | | | | GTGGTGGTTCTGAGATCGTGCTCACCCAGTCTCCAGCCACCATGTCTGTATCTCCC |
| | | | | GGGGAGAGGGCCACTCTCTCCTGCAGTGCCAGCTCAAGTATAAGTTCCAATTACTT |
| | | | | GCATTGGTATCAGCAGAAGCCAGGATTGCCCCCTAGACTCTTGATTTATAGGACATC |
| | | | | CAATCTGGCTTCTGGAATCCCAGATCGCTTCAGTGGCAGTGGGTCTGGGACCGATT |
| | | | | TCACTCTCACAATTAGCAGGCTGGAGGCTGAAGATTTTGCCACTTACTACTGCCAGC |
| | | | | AGGGTAGTAGTTTACCGTACACGTTCGGACAAGGGACCAAGCTTGAGATCAAATCC |
| | | | | GGAGGTGGTGGATCCGAGGTGCAGCTGGTCGAGTCTGGAGGAGGATTGGTGCAG |
| | | | | CCTGGAGGGTCATTGAAACTCTCATGTGCAGCCTCTGGATTCACCTTCAATAAGTAC |
| | | | | GCCATGAACTGGGTCCGCCAGGCTCCAGGAAAGGGTTTGGAATGGGTTGCTCGCA |
| | | | | TAAGAAGTAAATATAATAATTATGCAACATATTATGCCGATTCAGTGAAAGACAGGTT |
| | | | | CACCATCTCCAGAGATGATTCAAAAAACACTGCCTATCTACAAATGAACAACTTGAA |
| | | | | AACTGAGGACACTGCCGTGTACTACTGTGTGAGACATGGGAACTTCGGTAATAGCT |
| | | | | ACATATCCTACTGGGCTTACTGGGGCCAAGGGACTCTGGTCACCGTCTCCTCAGGT |
| | | | | GGTGGTGGTTCTGGCGGCGGCGGCTCCGGTGGTGGTGGTTCTCAGACTGTTGTGA |
| | | | | CTCAGGAACCTTCACTCACCGTATCACCTGGTGGAACAGTCACACTCACTTGTGGC |
| | | | | TCCTCGACTGGGGCTGTTACATCTGGCAACTACCCAAACTGGGTCCAACAAAAACC |
| | | | | AGGTCAGGCACCCCGTGGTCTAATAGGTGGGACTAAGTTCCTCGCCCCCGGTACT |
| | | | | CCTGCCAGATTCTCAGGCTCCCTGCTTGGAGGCAAGGCTGCCCTCACCCTCTCAG |
| | | | | GGGTACAGCCAGAGGATGAGGCAGAATATTACTGTGTTCTATGGTACAGCAACCGC |
| | | | | TGGGTGTTCGGTGGAGGAACCAAACTGACTGTCCTA |
| 901. | PM08E11-H | artificial | nt | CAGGTGCAGCTGGTCCAGTCTGGCGCCGAAGTGATGAAGCCTGGCGCCTCCGTGA |
| | codon | | | AGGTGTCCTGCAAGGCCTCCGGCTACACCATCACCGACACCTACATGGACTGGGT |
| | optimized | | | GCGGCAGGCTCCTGGACAGGGCCTGGAATGGATCGCCCGGATCGACCCTGCCAA |
| | | | | CGGCGACTCCAAGTACGACCCTAAGTTCCAGGGCAGAGTGACCATGACCGCCGAC |
| | | | | ACCTCCACCAACACCGTGTACATGGAACTGTCCTCCCTGCGGTCTGAGGACACCGC |
| | | | | CGTGTACTACTGCGCCAGGGGCGGCATGATCTGGTACTTCGACGTGTGGGGCCAG |
| | | | | GGCACCACCGTGACAGTGTCCTCT |
| 902. | PM08E11-L | artificial | nt | GAGATCGTGCTGACCCAGTCTCCTGCCACCATGTCTGTGTCTCCCGGCGAGAGAG |
| | codon | | | CCACCCTGTCCTGCTCCGCCTCCTCCTCCATCTCCTCCAACTACCTGCACTGGTAT |
| | optimized | | | CAGCAGAAGCCTGGCCTGCCTCCTCGGCTGCTGATCTACCGGACCTCCAACCTGG |
| | | | | CCTCTGGCATCCCCGACAGGTTCTCCGGCTCTGGCTCCGGCACCGACTTCACCCT |
| | | | | GACCATCTCCCGGCTGGAAGCTGAGGACTTCGCCACCTACTACTGCCAGCAGGGC |
| | | | | TCCTCCCTGCCTTACACCTTCGGACAGGGCACCAAGCTGGAAATCAAG |
| 903. | PM08E11-HL | artificial | nt | CAGGTGCAGCTGGTCCAGTCTGGCGCCGAAGTGATGAAGCCTGGCGCCTCCGTGA |
| | codon | | | AGGTGTCCTGCAAGGCCTCCGGCTACACCATCACCGACACCTACATGGACTGGGT |
| | optimized | | | GCGGCAGGCTCCTGGACAGGGCCTGGAATGGATCGCCCGGATCGACCCTGCCAA |
| | | | | CGGCGACTCCAAGTACGACCCTAAGTTCCAGGGCAGAGTGACCATGACCGCCGAC |
| | | | | ACCTCCACCAACACCGTGTACATGGAACTGTCCTCCCTGCGGTCTGAGGACACCGC |
| | | | | CGTGTACTACTGCGCCAGGGGCGGCATGATCTGGTACTTCGACGTGTGGGGCCAG |
| | | | | GGCACCACCGTGACAGTGTCCTCTGGCGGCGGAGGAAGTGGAGGTGGAGGATCT |
| | | | | GGTGGAGGCGGCTCCGAGATCGTGCTGACCCAGTCTCCTGCCACCATGTCTGTGT |
| | | | | CTCCCGGCGAGAGAGCCACCCTGTCCTGCTCCGCCTCCTCCTCCATCTCCTCCAAC |
| | | | | TACCTGCACTGGTATCAGCAGAAGCCTGGCCTGCCTCCTCGGCTGCTGATCTACCG |
| | | | | GACCTCCAACCTGGCCTCTGGCATCCCCGACAGGTTCTCCGGCTCTGGCTCCGGC |
| | | | | ACCGACTTCACCCTGACCATCTCCCGGCTGGAAGCTGAGGACTTCGCCACCTACTA |
| | | | | CTGCCAGCAGGGCTCCTCCCTGCCTTACACCTTCGGACAGGGCACCAAGCTGGAA |
| | | | | ATCAAG |
| 904. | PM08E11 | artificial | nt | CAGGTGCAGCTGGTCCAGTCTGGCGCCGAAGTGATGAAGCCTGGCGCCTCCGTGA |
| | HL x I2C | | | AGGTGTCCTGCAAGGCCTCCGGCTACACCATCACCGACACCTACATGGACTGGGT |
| | HL codon | | | GCGGCAGGCTCCTGGACAGGGCCTGGAATGGATCGCCCGGATCGACCCTGCCAA |
| | optimized | | | CGGCGACTCCAAGTACGACCCTAAGTTCCAGGGCAGAGTGACCATGACCGCCGAC |
| | | | | ACCTCCACCAACACCGTGTACATGGAACTGTCCTCCCTGCGGTCTGAGGACACCGC |
| | | | | CGTGTACTACTGCGCCAGGGGCGGCATGATCTGGTACTTCGACGTGTGGGGCCAG |
| | | | | GGCACCACCGTGACAGTGTCCTCTGGCGGCGGAGGAAGTGGAGGTGGAGGATCT |
| | | | | GGTGGAGGCGGCTCCGAGATCGTGCTGACCCAGTCTCCTGCCACCATGTCTGTGT |
| | | | | CTCCCGGCGAGAGAGCCACCCTGTCCTGCTCCGCCTCCTCCTCCATCTCCTCCAAC |
| | | | | TACCTGCACTGGTATCAGCAGAAGCCTGGCCTGCCTCCTCGGCTGCTGATCTACCG |
| | | | | GACCTCCAACCTGGCCTCTGGCATCCCCGACAGGTTCTCCGGCTCTGGCTCCGGC |
| | | | | ACCGACTTCACCCTGACCATCTCCCGGCTGGAAGCTGAGGACTTCGCCACCTACTA |
| | | | | CTGCCAGCAGGGCTCCTCCCTGCCTTACACCTTCGGACAGGGCACCAAGCTGGAA |
| | | | | ATCAAGTCTGGCGGAGGGGGCTCTGAAGTGCAGCTGGTGGAAAGCGGAGGGGGA |
| | | | | CTGGTGCAGCCCGGGGGAAGTCTGAAGCTGTCCTGTGCCGCCAGCGGCTTTACCT |
| | | | | TCAACAAGTACGCCATGAATTGGGTCCGACAGGCCCCAGGGAAAGGCCTGGAATG |
| | | | | GGTGGCACGGATCCGGTCCAAGTACAACAACTACGCCACCTACTACGCTGACTCCG |
| | | | | TGAAGGACAGATTCACCATCAGCCGGGACGACTCTAAGAACACCGCCTATCTGCAG |
| | | | | ATGAACAACCTGAAAACCGAGGATACAGCTGTGTACTATTGTGTGCGGCACGGCAA |
| | | | | CTTCGGCAACTCCTACATCTCCTACTGGGCCTATTGGGGACAGGGAACACTGGTCA |
| | | | | CCGTGTCTAGCGGAGGTGGCGGAAGTGGGGGAGGCGGATCTGGCGGTGGCGGAT |
| | | | | CCCAGACCGTGGTCACCCAGGAACCTTCCCTGACCGTCTCCCCAGGCGGCACCGT |
| | | | | GACCCTGACCTGTGGCTCCTCTACCGGCGCTGTGACCTCCGGCAACTACCCTAACT |
| | | | | GGGTGCAGCAGAAACCCGGACAGGCTCCTAGAGGCCTGATCGGCGGCACCAAGTT |
| | | | | TCTGGCCCCTGGCACCCCTGCCAGATTCTCCGGCTCCCTGCTGGGAGGCAAGGCC |
| | | | | GCTCTGACCCTGTCTGGCGTGCAGCCTGAGGACGAGGCCGAGTACTACTGTGTGC |
| | | | | TGTGGTACTCCAACAGATGGGTGTTCGGAGGCGGCACAAAGCTGACCGTGCTG |
| 905. | PM95H6-H | artificial | aa | QVQLVQSGAEVMKPGASVKVSCKASGYNFKDTYMDWVKQTPEQGLEWMGRIDPANG |
| | | | | DSKYDPKFQGRVTITADTSTNTAYMELSSLRSEDTAVYYCARGGMIWYFDVWGQGTTV |
| | | | | TVSS |
| 906. | PM95H6-HCDR1 | artificial | aa | DTYMD |
| 907. | PM95H6-HCDR2 | artificial | aa | RIDPANGDSKYDPKFQG |
| 908. | PM95H6-HCDR3 | artificial | aa | GGMIWYFDV |
| 909. | PM95H6-H | artificial | nt | CAGGTGCAGCTGGTCCAGTCTGGGGCAGAGGTTATGAAGCCAGGGGCCTCAGTCA |
| | | | | AGGTGTCCTGCAAAGCTTCTGGCTACAACTTTAAAGACACCTATATGGACTGGGTGA |
| | | | | AGCAGACGCCTGAACAGGGCCTGGAATGGATGGGAAGGATTGATCCTGCGAATGG |
| | | | | TGATAGTAAATATGACCCGAAATTCCAGGGCAGGGTCACTATAACAGCAGACACAT |
| | | | | CCACCAACACAGCCTACATGGAGCTCAGCAGCCTGAGATCTGAGGACACTGCCGT |
| | | | | CTATTATTGTGCTAGAGGCGGGATGATATGGTACTTCGATGTCTGGGGCCAAGGGA |
| | | | | CCACGGTCACCGTCTCCTCA |
| 910. | PM95H6-L | artificial | aa | EIVLTQSPATLAVSPGEKVTLSCSASSSISSNYLHWYQQKPGLPPRLLIYRTSNLASGVP |
| | | | | DRFSGSGSGTDFTLTISRLEPEDFATYYCQQGSSLPYTFGQGTKLEIK |
| 911. | PM95H6-LCDR1 | artificial | aa | SASSSISSNYLH |
| 912. | PM95H6-LCDR2 | artificial | aa | RTSNLAS |
| 913. | PM95H6-LCDR3 | artificial | aa | QQGSSLPYT |
| 914. | PM95H6-L | artificial | nt | GAGATCGTGCTCACCCAGTCTCCAGCCACCCTGGCTGTATCTCCCGGGGAGAAGG |
| | | | | TCACTCTCTCCTGCAGTGCCAGCTCAAGTATAAGTTCCAATTACTTGCATTGGTATC |
| | | | | AGCAGAAGCCAGGATTGCCCCCTAGACTCTTGATTTATAGGACATCCAATCTGGCTT |
| | | | | CTGGAGTCCCAGATCGCTTCAGTGGCAGTGGGTCTGGGACCGATTTCACTCTCACA |
| | | | | ATTAGCAGGCTGGAGCCTGAAGATTTTGCCACTTACTACTGCCAGCAGGGTAGTAG |
| | | | | TTTACCGTACACGTTCGGACAAGGGACCAAGCTTGAGATCAAA |
| 915. | PM95H6-HL | artificial | aa | QVQLVQSGAEVMKPGASVKVSCKASGYNFKDTYMDWVKQTPEQGLEWMGRIDPANG |
| | | | | DSKYDPKFQGRVTITADTSTNTAYMELSSLRSEDTAVYYCARGGMIWYFDVWGQGTTV |
| | | | | TVSSGGGGSGGGGSGGGGSEIVLTQSPATLAVSPGEKVTLSCSASSSISSNYLHWYQ |
| | | | | QKPGLPPRLLIYRTSNLASGVPDRFSGSGSGTDFTLTISRLEPEDFATYYCQQGSSLPY |
| | | | | TFGQGTKLEIK |
| 916. | PM95H6-HL | artificial | nt | CAGGTGCAGCTGGTCCAGTCTGGGGCAGAGGTTATGAAGCCAGGGGCCTCAGTCA |
| | | | | AGGTGTCCTGCAAAGCTTCTGGCTACAACTTTAAAGACACCTATATGGACTGGGTGA |
| | | | | AGCAGACGCCTGAACAGGGCCTGGAATGGATGGGAAGGATTGATCCTGCGAATGG |
| | | | | TGATAGTAAATATGACCCGAAATTCCAGGGCAGGGTCACTATAACAGCAGACACAT |
| | | | | CCACCAACACAGCCTACATGGAGCTCAGCAGCCTGAGATCTGAGGACACTGCCGT |
| | | | | CTATTATTGTGCTAGAGGCGGGATGATATGGTACTTCGATGTCTGGGGCCAAGGGA |
| | | | | CCACGGTCACCGTCTCCTCAGGTGGTGGTGGTTCTGGCGGCGGCGGCTCCGGTG |
| | | | | GTGGTGGTTCTGAGATCGTGCTCACCCAGTCTCCAGCCACCCTGGCTGTATCTCCC |
| | | | | GGGGAGAAGGTCACTCTCTCCTGCAGTGCCAGCTCAAGTATAAGTTCCAATTACTT |
| | | | | GCATTGGTATCAGCAGAAGCCAGGATTGCCCCCTAGACTCTTGATTTATAGGACATC |
| | | | | CAATCTGGCTTCTGGAGTCCCAGATCGCTTCAGTGGCAGTGGGTCTGGGACCGATT |
| | | | | TCACTCTCACAATTAGCAGGCTGGAGCCTGAAGATTTTGCCACTTACTACTGCCAGC |
| | | | | AGGGTAGTAGTTTACCGTACACGTTCGGACAAGGGACCAAGCTTGAGATCAAA |
| 917. | PM95H6 | artificial | aa | QVQLVQSGAEVMKPGASVKVSCKASGYNFKDTYMDWVKQTPEQGLEWMGRIDPANG |
| | HL X I2C | | | DSKYDPKFQGRVTITADTSTNTAYMELSSLRSEDTAVYYCARGGMIWYFDVWGQGTTV |
| | HL | | | TVSSGGGGSGGGGSGGGGSEIVLTQSPATLAVSPGEKVTLSCSASSSISSNYLHWYQ |
| | | | | QKPGLPPRLLIYRTSNLASGVPDRFSGSGSGTDFTLTISRLEPEDFATYYCQQGSSLPY |
| | | | | TFGQGTKLEIKSGGGGSEVQLVESGGGLVQPGGSLKLSCAASGFTFNKYAMNWVRQA |
| | | | | PGKGLEWVARIRSKYNNYATYYADSVKDRFTISRDDSKNTAYLQMNNLKTEDTAVYYC |
| | | | | VRHGNFGNSYISYWAYWGQGTLVTVSSGGGGSGGGGSGGGGSQTVVTQEPSLTVSP |
| | | | | GGTVTLTCGSSTGAVTSGNYPNWVQQKPGQAPRGLIGGTKFLAPGTPARFSGSLLGG |
| | | | | KAALTLSGVQPEDEAEYYCVLWYSNRWVFGGGTKLTVL |
| 918. | PM95H6 | artificial | nt | CAGGTGCAGCTGGTCCAGTCTGGGGCAGAGGTTATGAAGCCAGGGGCCTCAGTCA |
| | HL X I2C | | | AGGTGTCCTGCAAAGCTTCTGGCTACAACTTTAAAGACACCTATATGGACTGGGTGA |
| | HL | | | AGCAGACGCCTGAACAGGGCCTGGAATGGATGGGAAGGATTGATCCTGCGAATGG |
| | | | | TGATAGTAAATATGACCCGAAATTCCAGGGCAGGGTCACTATAACAGCAGACACAT |
| | | | | CCACCAACACAGCCTACATGGAGCTCAGCAGCCTGAGATCTGAGGACACTGCCGT |
| | | | | CTATTATTGTGCTAGAGGCGGGATGATATGGTACTTCGATGTCTGGGGCCAAGGGA |
| | | | | CCACGGTCACCGTCTCCTCAGGTGGTGGTGGTTCTGGCGGCGGCGGCTCCGGTG |
| | | | | GTGGTGGTTCTGAGATCGTGCTCACCCAGTCTCCAGCCACCCTGGCTGTATCTCCC |
| | | | | GGGGAGAAGGTCACTCTCTCCTGCAGTGCCAGCTCAAGTATAAGTTCCAATTACTT |
| | | | | GCATTGGTATCAGCAGAAGCCAGGATTGCCCCCTAGACTCTTGATTTATAGGACATC |
| | | | | CAATCTGGCTTCTGGAGTCCCAGATCGCTTCAGTGGCAGTGGGTCTGGGACCGATT |
| | | | | TCACTCTCACAATTAGCAGGCTGGAGCCTGAAGATTTTGCCACTTACTACTGCCAGC |
| | | | | AGGGTAGTAGTTTACCGTACACGTTCGGACAAGGGACCAAGCTTGAGATCAAATCC |
| | | | | GGAGGTGGTGGATCCGAGGTGCAGCTGGTCGAGTCTGGAGGAGGATTGGTGCAG |
| | | | | CCTGGAGGGTCATTGAAACTCTCATGTGCAGCCTCTGGATTCACCTTCAATAAGTAC |
| | | | | GCCATGAACTGGGTCCGCCAGGCTCCAGGAAAGGGTTTGGAATGGGTTGCTCGCA |
| | | | | TAAGAAGTAAATATAATAATTATGCAACATATTATGCCGATTCAGTGAAAGACAGGTT |
| | | | | CACCATCTCCAGAGATGATTCAAAAAACACTGCCTATCTACAAATGAACAACTTGAA |
| | | | | AACTGAGGACACTGCCGTGTACTACTGTGTGAGACATGGGAACTTCGGTAATAGCT |
| | | | | ACATATCCTACTGGGCTTACTGGGGCCAAGGGACTCTGGTCACCGTCTCCTCAGGT |
| | | | | GGTGGTGGTTCTGGCGGCGGCGGCTCCGGTGGTGGTGGTTCTCAGACTGTTGTGA |
| | | | | CTCAGGAACCTTCACTCACCGTATCACCTGGTGGAACAGTCACACTCACTTGTGGC |
| | | | | TCCTCGACTGGGGCTGTTACATCTGGCAACTACCCAAACTGGGTCCAACAAAAACC |
| | | | | AGGTCAGGCACCCCGTGGTCTAATAGGTGGGACTAAGTTCCTCGCCCCCGGTACT |
| | | | | CCTGCCAGATTCTCAGGCTCCCTGCTTGGAGGCAAGGCTGCCCTCACCCTCTCAG |
| | | | | GGGTACAGCCAGAGGATGAGGCAGAATATTACTGTGTTCTATGGTACAGCAACCGC |
| | | | | TGGGTGTTCGGTGGAGGAACCAAACTGACTGTCCTA |
| 919. | PM95H6-H | artificial | nt | CAGGTGCAGCTGGTCCAGTCTGGCGCCGAAGTGATGAAGCCTGGCGCCTCCGTGA |
| | codon | | | AGGTGTCCTGCAAGGCCTCCGGCTACAACTTCAAGGACACCTACATGGACTGGGTG |
| | optimized | | | AAACAGACCCCTGAGCAGGGCCTGGAATGGATGGGCCGGATCGACCCTGCCAACG |
| | | | | GCGACTCCAAGTACGACCCTAAGTTCCAGGGCAGAGTGACCATCACCGCCGACAC |
| | | | | CTCCACCAACACCGCCTACATGGAACTGTCCTCCCTGCGGTCTGAGGACACCGCC |
| | | | | GTGTACTACTGCGCCAGGGGCGGCATGATCTGGTACTTCGACGTGTGGGGCCAGG |
| | | | | GCACCACCGTGACAGTGTCCTCT |
| 920. | PM95H6-L | artificial | nt | GAGATCGTGCTGACCCAGTCTCCTGCCACCCTGGCTGTGTCTCCCGGCGAGAAAG |
| | codon | | | TGACCCTGTCCTGCTCCGCCTCCTCCTCCATCTCCTCCAACTACCTGCACTGGTATC |
| | optimized | | | AGCAGAAGCCTGGCCTGCCTCCTCGGCTGCTGATCTACCGGACCTCCAACCTGGC |
| | | | | CTCTGGCGTGCCCGACAGGTTCTCCGGCTCTGGCTCCGGCACCGACTTCACCCTG |
| | | | | ACCATCTCCCGGCTGGAACCTGAGGACTTCGCCACCTACTACTGCCAGCAGGGCT |
| | | | | CCTCCCTGCCTTACACCTTCGGACAGGGCACCAAGCTGGAAATCAAG |
| 921. | PM95H6-HL | artificial | nt | CAGGTGCAGCTGGTCCAGTCTGGCGCCGAAGTGATGAAGCCTGGCGCCTCCGTGA |
| | codon | | | AGGTGTCCTGCAAGGCCTCCGGCTACAACTTCAAGGACACCTACATGGACTGGGTG |
| | optimized | | | AAACAGACCCCTGAGCAGGGCCTGGAATGGATGGGCCGGATCGACCCTGCCAACG |
| | | | | GCGACTCCAAGTACGACCCTAAGTTCCAGGGCAGAGTGACCATCACCGCCGACAC |
| | | | | CTCCACCAACACCGCCTACATGGAACTGTCCTCCCTGCGGTCTGAGGACACCGCC |
| | | | | GTGTACTACTGCGCCAGGGGCGGCATGATCTGGTACTTCGACGTGTGGGGCCAGG |
| | | | | GCACCACCGTGACAGTGTCCTCTGGCGGCGGAGGAAGTGGAGGTGGAGGATCTG |
| | | | | GTGGAGGCGGCTCCGAGATCGTGCTGACCCAGTCTCCTGCCACCCTGGCTGTGTC |
| | | | | TCCCGGCGAGAAAGTGACCCTGTCCTGCTCCGCCTCCTCCTCCATCTCCTCCAACT |
| | | | | ACCTGCACTGGTATCAGCAGAAGCCTGGCCTGCCTCCTCGGCTGCTGATCTACCG |
| | | | | GACCTCCAACCTGGCCTCTGGCGTGCCCGACAGGTTCTCCGGCTCTGGCTCCGGC |
| | | | | ACCGACTTCACCCTGACCATCTCCCGGCTGGAACCTGAGGACTTCGCCACCTACTA |
| | | | | CTGCCAGCAGGGCTCCTCCCTGCCTTACACCTTCGGACAGGGCACCAAGCTGGAA |
| | | | | ATCAAG |
| 922. | PM95H6 | artificial | nt | CAGGTGCAGCTGGTCCAGTCTGGCGCCGAAGTGATGAAGCCTGGCGCCTCCGTGA |
| | HL x I2C | | | AGGTGTCCTGCAAGGCCTCCGGCTACAACTTCAAGGACACCTACATGGACTGGGTG |
| | HL codon | | | AAACAGACCCCTGAGCAGGGCCTGGAATGGATGGGCCGGATCGACCCTGCCAACG |
| | optimized | | | GCGACTCCAAGTACGACCCTAAGTTCCAGGGCAGAGTGACCATCACCGCCGACAC |
| | | | | CTCCACCAACACCGCCTACATGGAACTGTCCTCCCTGCGGTCTGAGGACACCGCC |
| | | | | GTGTACTACTGCGCCAGGGGCGGCATGATCTGGTACTTCGACGTGTGGGGCCAGG |
| | | | | GCACCACCGTGACAGTGTCCTCTGGCGGCGGAGGAAGTGGAGGTGGAGGATCTG |
| | | | | GTGGAGGCGGCTCCGAGATCGTGCTGACCCAGTCTCCTGCCACCCTGGCTGTGTC |
| | | | | TCCCGGCGAGAAAGTGACCCTGTCCTGCTCCGCCTCCTCCTCCATCTCCTCCAACT |
| | | | | ACCTGCACTGGTATCAGCAGAAGCCTGGCCTGCCTCCTCGGCTGCTGATCTACCG |
| | | | | GACCTCCAACCTGGCCTCTGGCGTGCCCGACAGGTTCTCCGGCTCTGGCTCCGGC |
| | | | | ACCGACTTCACCCTGACCATCTCCCGGCTGGAACCTGAGGACTTCGCCACCTACTA |
| | | | | CTGCCAGCAGGGCTCCTCCCTGCCTTACACCTTCGGACAGGGCACCAAGCTGGAA |
| | | | | ATCAAGTCTGGCGGAGGGGGCTCTGAAGTGCAGCTGGTGGAAAGCGGAGGGGGA |
| | | | | CTGGTGCAGCCCGGGGGAAGTCTGAAGCTGTCCTGTGCCGCCAGCGGCTTTACCT |
| | | | | TCAACAAGTACGCCATGAATTGGGTCCGACAGGCCCCAGGGAAAGGCCTGGAATG |
| | | | | GGTGGCACGGATCCGGTCCAAGTACAACAACTACGCCACCTACTACGCTGACTCCG |
| | | | | TGAAGGACAGATTCACCATCAGCCGGGACGACTCTAAGAACACCGCCTATCTGCAG |
| | | | | ATGAACAACCTGAAAACCGAGGATACAGCTGTGTACTATTGTGTGCGGCACGGCAA |
| | | | | CTTCGGCAACTCCTACATCTCCTACTGGGCCTATTGGGGACAGGGAACACTGGTCA |
| | | | | CCGTGTCTAGCGGAGGTGGCGGAAGTGGGGGAGGCGGATCTGGCGGTGGCGGAT |
| | | | | CCCAGACCGTGGTCACCCAGGAACCTTCCCTGACCGTCTCCCCAGGCGGCACCGT |
| | | | | GACCCTGACCTGTGGCTCCTCTACCGGCGCTGTGACCTCCGGCAACTACCCTAACT |
| | | | | GGGTGCAGCAGAAACCCGGACAGGCTCCTAGAGGCCTGATCGGCGGCACCAAGTT |
| | | | | TCTGGCCCCTGGCACCCCTGCCAGATTCTCCGGCTCCCTGCTGGGAGGCAAGGCC |
| | | | | GCTCTGACCCTGTCTGGCGTGCAGCCTGAGGACGAGGCCGAGTACTACTGTGTGC |
| | | | | TGTGGTACTCCAACAGATGGGTGTTCGGAGGCGGCACAAAGCTGACCGTGCTG |
| 923. | PM95A8-H | artificial | aa | QVQLVQSGAEVMKPGASVKVSCKASGYNFKDTYMDWVKQTPEQGLEWMGRIDPANG |
| | | | | DSKYDPKFQGRVTITADTSTNTAYMELSSLRSEDTAVYYCARGGMIWYFDVWGQGTTV |
| | | | | TVSS |
| 924. | PM95A8-HCDR1 | artificial | aa | DTYMD |
| 925. | PM95A8-HCDR2 | artificial | aa | RIDPANGDSKYDPKFQG |
| 926. | PM95A8-HCDR3 | artificial | aa | GGMIWYFDV |
| 927. | PM95A8-H | artificial | nt | CAGGTGCAGCTGGTCCAGTCTGGGGCAGAGGTTATGAAGCCAGGGGCCTCAGTCA |
| | | | | AGGTGTCCTGCAAAGCTTCTGGCTACAACTTTAAAGACACCTATATGGACTGGGTGA |
| | | | | AGCAGACGCCTGAACAGGGCCTGGAATGGATGGGAAGGATTGATCCTGCGAATGG |
| | | | | TGATAGTAAATATGACCCGAAATTCCAGGGCAGGGTCACTATAACAGCAGACACAT |
| | | | | CCACCAACACAGCCTACATGGAGCTCAGCAGCCTGAGATCTGAGGACACTGCCGT |
| | | | | CTATTATTGTGCTAGAGGCGGGATGATATGGTACTTCGATGTCTGGGGCCAAGGGA |
| | | | | CCACGGTCACCGTCTCCTCA |
| 928. | PM95A8-L | artificial | aa | EIVLTQSPATMSVSPGERATLSCSASSSISSNYLHWYQQKPGLPPRLLIYRTSNLASGIP |
| | | | | DRFSGSGSGTDFTLTISRLEAEDFATYYCQQGSSLPYTFGQGTKLEIK |
| 929. | PM95A8-LCDR1 | artificial | aa | SASSSISSNYLH |
| 930. | PM95A8-LCDR2 | artificial | aa | RTSNLAS |
| 931. | PM95A8-LCDR3 | artificial | aa | QQGSSLPYT |
| 932. | PM95A8-L | artificial | nt | GAGATCGTGCTCACCCAGTCTCCAGCCACCATGTCTGTATCTCCCGGGGAGAGGG |
| | | | | CCACTCTCTCCTGCAGTGCCAGCTCAAGTATAAGTTCCAATTACTTGCATTGGTATC |
| | | | | AGCAGAAGCCAGGATTGCCCCCTAGACTCTTGATTTATAGGACATCCAATCTGGCTT |
| | | | | CTGGAATCCCAGATCGCTTCAGTGGCAGTGGGTCTGGGACCGATTTCACTCTCACA |
| | | | | ATTAGCAGGCTGGAGGCTGAAGATTTTGCCACTTACTACTGCCAGCAGGGTAGTAG |
| | | | | TTTACCGTACACGTTCGGACAAGGGACCAAGCTTGAGATCAAA |
| 933. | PM95A8-HL | artificial | aa | QVQLVQSGAEVMKPGASVKVSCKASGYNFKDTYMDWVKQTPEQGLEWMGRIDPANG |
| | | | | DSKYDPKFQGRVTITADTSTNTAYMELSSLRSEDTAVYYCARGGMIWYFDVWGQGTTV |
| | | | | TVSSGGGGSGGGGSGGGGSEIVLTQSPATMSVSPGERATLSCSASSSISSNYLHWYQ |
| | | | | QKPGLPPRLLIYRTSNLASGIPDRFSGSGSGTDFTLTISRLEAEDFATYYCQQGSSLPYT |
| | | | | FGQGTKLEIK |
| 934. | PM95A8-HL | artificial | nt | CAGGTGCAGCTGGTCCAGTCTGGGGCAGAGGTTATGAAGCCAGGGGCCTCAGTCA |
| | | | | AGGTGTCCTGCAAAGCTTCTGGCTACAACTTTAAAGACACCTATATGGACTGGGTGA |
| | | | | AGCAGACGCCTGAACAGGGCCTGGAATGGATGGGAAGGATTGATCCTGCGAATGG |
| | | | | TGATAGTAAATATGACCCGAAATTCCAGGGCAGGGTCACTATAACAGCAGACACAT |
| | | | | CCACCAACACAGCCTACATGGAGCTCAGCAGCCTGAGATCTGAGGACACTGCCGT |
| | | | | CTATTATTGTGCTAGAGGCGGGATGATATGGTACTTCGATGTCTGGGGCCAAGGGA |
| | | | | CCACGGTCACCGTCTCCTCAGGTGGTGGTGGTTCTGGCGGCGGCGGCTCCGGTG |
| | | | | GTGGTGGTTCTGAGATCGTGCTCACCCAGTCTCCAGCCACCATGTCTGTATCTCCC |
| | | | | GGGGAGAGGGCCACTCTCTCCTGCAGTGCCAGCTCAAGTATAAGTTCCAATTACTT |
| | | | | GCATTGGTATCAGCAGAAGCCAGGATTGCCCCCTAGACTCTTGATTTATAGGACATC |
| | | | | CAATCTGGCTTCTGGAATCCCAGATCGCTTCAGTGGCAGTGGGTCTGGGACCGATT |
| | | | | TCACTCTCACAATTAGCAGGCTGGAGGCTGAAGATTTTGCCACTTACTACTGCCAGC |
| | | | | AGGGTAGTAGTTTACCGTACACGTTCGGACAAGGGACCAAGCTTGAGATCAAA |
| 935. | PM95A8 | artificial | aa | QVQLVQSGAEVMKPGASVKVSCKASGYNFKDTYMDWVKQTPEQGLEWMGRIDPANG |
| | HL X I2C | | | DSKYDPKFQGRVTITADTSTNTAYMELSSLRSEDTAVYYCARGGMIWYFDVWGQGTTV |
| | HL | | | TVSSGGGGSGGGGSGGGGSEIVLTQSPATMSVSPGERATLSCSASSSISSNYLHWYQ |
| | | | | QKPGLPPRLLIYRTSNLASGIPDRFSGSGSGTDFTLTISRLEAEDFATYYCQQGSSLPYT |
| | | | | FGQGTKLEIKSGGGGSEVQLVESGGGLVQPGGSLKLSCAASGFTFNKYAMNWVRQAP |
| | | | | GKGLEWVARIRSKYNNYATYYADSVKDRFTISRDDSKNTAYLQMNNLKTEDTAVYYCV |
| | | | | RHGNFGNSYISYWAYWGQGTLVTVSSGGGGSGGGGSGGGGSQTVVTQEPSLTVSPG |
| | | | | GTVTLTCGSSTGAVTSGNYPNWVQQKPGQAPRGLIGGTKFLAPGTPARFSGSLLGGK |
| | | | | AALTLSGVQPEDEAEYYCVLWYSNRWVFGGGTKLTVL |
| 936. | PM95A8 | artificial | nt | CAGGTGCAGCTGGTCCAGTCTGGGGCAGAGGTTATGAAGCCAGGGGCCTCAGTCA |
| | HL X I2C | | | AGGTGTCCTGCAAAGCTTCTGGCTACAACTTTAAAGACACCTATATGGACTGGGTGA |
| | HL | | | AGCAGACGCCTGAACAGGGCCTGGAATGGATGGGAAGGATTGATCCTGCGAATGG |
| | | | | TGATAGTAAATATGACCCGAAATTCCAGGGCAGGGTCACTATAACAGCAGACACAT |
| | | | | CCACCAACACAGCCTACATGGAGCTCAGCAGCCTGAGATCTGAGGACACTGCCGT |
| | | | | CTATTATTGTGCTAGAGGCGGGATGATATGGTACTTCGATGTCTGGGGCCAAGGGA |
| | | | | CCACGGTCACCGTCTCCTCAGGTGGTGGTGGTTCTGGCGGCGGCGGCTCCGGTG |
| | | | | GTGGTGGTTCTGAGATCGTGCTCACCCAGTCTCCAGCCACCATGTCTGTATCTCCC |
| | | | | GGGGAGAGGGCCACTCTCTCCTGCAGTGCCAGCTCAAGTATAAGTTCCAATTACTT |
| | | | | GCATTGGTATCAGCAGAAGCCAGGATTGCCCCCTAGACTCTTGATTTATAGGACATC |
| | | | | CAATCTGGCTTCTGGAATCCCAGATCGCTTCAGTGGCAGTGGGTCTGGGACCGATT |
| | | | | TCACTCTCACAATTAGCAGGCTGGAGGCTGAAGATTTTGCCACTTACTACTGCCAGC |
| | | | | AGGGTAGTAGTTTACCGTACACGTTCGGACAAGGGACCAAGCTTGAGATCAAATCC |
| | | | | GGAGGTGGTGGATCCGAGGTGCAGCTGGTCGAGTCTGGAGGAGGATTGGTGCAG |
| | | | | CCTGGAGGGTCATTGAAACTCTCATGTGCAGCCTCTGGATTCACCTTCAATAAGTAC |
| | | | | GCCATGAACTGGGTCCGCCAGGCTCCAGGAAAGGGTTTGGAATGGGTTGCTCGCA |
| | | | | TAAGAAGTAAATATAATAATTATGCAACATATTATGCCGATTCAGTGAAAGACAGGTT |
| | | | | CACCATCTCCAGAGATGATTCAAAAAACACTGCCTATCTACAAATGAACAACTTGAA |
| | | | | AACTGAGGACACTGCCGTGTACTACTGTGTGAGACATGGGAACTTCGGTAATAGCT |
| | | | | ACATATCCTACTGGGCTTACTGGGGCCAAGGGACTCTGGTCACCGTCTCCTCAGGT |
| | | | | GGTGGTGGTTCTGGCGGCGGCGGCTCCGGTGGTGGTGGTTCTCAGACTGTTGTGA |
| | | | | CTCAGGAACCTTCACTCACCGTATCACCTGGTGGAACAGTCACACTCACTTGTGGC |
| | | | | TCCTCGACTGGGGCTGTTACATCTGGCAACTACCCAAACTGGGTCCAACAAAAACC |
| | | | | AGGTCAGGCACCCCGTGGTCTAATAGGTGGGACTAAGTTCCTCGCCCCCGGTACT |
| | | | | CCTGCCAGATTCTCAGGCTCCCTGCTTGGAGGCAAGGCTGCCCTCACCCTCTCAG |
| | | | | GGGTACAGCCAGAGGATGAGGCAGAATATTACTGTGTTCTATGGTACAGCAACCGC |
| | | | | TGGGTGTTCGGTGGAGGAACCAAACTGACTGTCCTA |
| 937. | PM95A8-H | artificial | nt | CAGGTGCAGCTGGTCCAGTCTGGCGCCGAAGTGATGAAGCCTGGCGCCTCCGTGA |
| | codon | | | AGGTGTCCTGCAAGGCCTCCGGCTACAACTTCAAGGACACCTACATGGACTGGGTG |
| | optimized | | | AAACAGACCCCTGAGCAGGGCCTGGAATGGATGGGCCGGATCGACCCTGCCAACG |
| | | | | GCGACTCCAAGTACGACCCTAAGTTCCAGGGCAGAGTGACCATCACCGCCGACAC |
| | | | | CTCCACCAACACCGCCTACATGGAACTGTCCTCCCTGCGGTCTGAGGACACCGCC |
| | | | | GTGTACTACTGCGCCAGGGGCGGCATGATCTGGTACTTCGACGTGTGGGGCCAGG |
| | | | | GCACCACCGTGACAGTGTCCTCT |
| 938. | PM95A8-HCDR1 | artificial | nt | GAGATCGTGCTGACCCAGTCTCCTGCCACCATGTCCGTGTCTCCCGGCGAGAGGG |
| | codon | | | CTACCCTGTCCTGCTCCGCCTCCTCCTCCATCTCCTCCAACTACCTGCACTGGTATC |
| | optimized | | | AGCAGAAGCCTGGCCTGCCTCCTCGGCTGCTGATCTACCGGACCTCCAACCTGGC |
| | | | | CTCTGGCATCCCCGACAGGTTCTCCGGCTCTGGCTCCGGCACCGACTTCACCCTG |
| | | | | ACCATCTCCCGGCTGGAAGCTGAGGACTTCGCCACCTACTACTGCCAGCAGGGCT |
| | | | | CCTCCCTGCCTTACACCTTCGGACAGGGCACCAAGCTGGAAATCAAG |
| 939. | PM95A8-HCDR2 | artificial | nt | CAGGTGCAGCTGGTCCAGTCTGGCGCCGAAGTGATGAAGCCTGGCGCCTCCGTGA |
| | codon | | | AGGTGTCCTGCAAGGCCTCCGGCTACAACTTCAAGGACACCTACATGGACTGGGTG |
| | optimized | | | AAACAGACCCCTGAGCAGGGCCTGGAATGGATGGGCCGGATCGACCCTGCCAACG |
| | | | | GCGACTCCAAGTACGACCCTAAGTTCCAGGGCAGAGTGACCATCACCGCCGACAC |
| | | | | CTCCACCAACACCGCCTACATGGAACTGTCCTCCCTGCGGTCTGAGGACACCGCC |
| | | | | GTGTACTACTGCGCCAGGGGCGGCATGATCTGGTACTTCGACGTGTGGGGCCAGG |
| | | | | GCACCACCGTGACAGTGTCCTCTGGCGGCGGAGGAAGTGGAGGTGGAGGATCTG |
| | | | | GTGGAGGCGGCTCCGAGATCGTGCTGACCCAGTCTCCTGCCACCATGTCCGTGTC |
| | | | | TCCCGGCGAGAGGGCTACCCTGTCCTGCTCCGCCTCCTCCTCCATCTCCTCCAACT |
| | | | | ACCTGCACTGGTATCAGCAGAAGCCTGGCCTGCCTCCTCGGCTGCTGATCTACCG |
| | | | | GACCTCCAACCTGGCCTCTGGCATCCCCGACAGGTTCTCCGGCTCTGGCTCCGGC |
| | | | | ACCGACTTCACCCTGACCATCTCCCGGCTGGAAGCTGAGGACTTCGCCACCTACTA |
| | | | | CTGCCAGCAGGGCTCCTCCCTGCCTTACACCTTCGGACAGGGCACCAAGCTGGAA |
| | | | | ATCAAG |
| 940. | PM95A8 HL x | artificial | nt | CAGGTGCAGCTGGTCCAGTCTGGCGCCGAAGTGATGAAGCCTGGCGCCTCCGTGA |
| | I2CH L_codon | | | AGGTGTCCTGCAAGGCCTCCGGCTACAACTTCAAGGACACCTACATGGACTGGGTG |
| | optimized | | | AAACAGACCCCTGAGCAGGGCCTGGAATGGATGGGCCGGATCGACCCTGCCAACG |
| | | | | GCGACTCCAAGTACGACCCTAAGTTCCAGGGCAGAGTGACCATCACCGCCGACAC |
| | | | | CTCCACCAACACCGCCTACATGGAACTGTCCTCCCTGCGGTCTGAGGACACCGCC |
| | | | | GTGTACTACTGCGCCAGGGGCGGCATGATCTGGTACTTCGACGTGTGGGGCCAGG |
| | | | | GCACCACCGTGACAGTGTCCTCTGGCGGCGGAGGAAGTGGAGGTGGAGGATCTG |
| | | | | GTGGAGGCGGCTCCGAGATCGTGCTGACCCAGTCTCCTGCCACCATGTCCGTGTC |
| | | | | TCCCGGCGAGAGGGCTACCCTGTCCTGCTCCGCCTCCTCCTCCATCTCCTCCAACT |
| | | | | ACCTGCACTGGTATCAGCAGAAGCCTGGCCTGCCTCCTCGGCTGCTGATCTACCG |
| | | | | GACCTCCAACCTGGCCTCTGGCATCCCCGACAGGTTCTCCGGCTCTGGCTCCGGC |
| | | | | ACCGACTTCACCCTGACCATCTCCCGGCTGGAAGCTGAGGACTTCGCCACCTACTA |
| | | | | CTGCCAGCAGGGCTCCTCCCTGCCTTACACCTTCGGACAGGGCACCAAGCTGGAA |
| | | | | ATCAAGTCTGGCGGAGGGGGCTCTGAAGTGCAGCTGGTGGAAAGCGGAGGGGGA |
| | | | | CTGGTGCAGCCCGGGGGAAGTCTGAAGCTGTCCTGTGCCGCCAGCGGCTTTACCT |
| | | | | TCAACAAGTACGCCATGAATTGGGTCCGACAGGCCCCAGGGAAAGGCCTGGAATG |
| | | | | GGTGGCACGGATCCGGTCCAAGTACAACAACTACGCCACCTACTACGCTGACTCCG |
| | | | | TGAAGGACAGATTCACCATCAGCCGGGACGACTCTAAGAACACCGCCTATCTGCAG |
| | | | | ATGAACAACCTGAAAACCGAGGATACAGCTGTGTACTATTGTGTGCGGCACGGCAA |
| | | | | CTTCGGCAACTCCTACATCTCCTACTGGGCCTATTGGGGACAGGGAACACTGGTCA |
| | | | | CCGTGTCTAGCGGAGGTGGCGGAAGTGGGGGAGGCGGATCTGGCGGTGGCGGAT |
| | | | | CCCAGACCGTGGTCACCCAGGAACCTTCCCTGACCGTCTCCCCAGGCGGCACCGT |
| | | | | GACCCTGACCTGTGGCTCCTCTACCGGCGCTGTGACCTCCGGCAACTACCCTAACT |
| | | | | GGGTGCAGCAGAAACCCGGACAGGCTCCTAGAGGCCTGATCGGCGGCACCAAGTT |
| | | | | TCTGGCCCCTGGCACCCCTGCCAGATTCTCCGGCTCCCTGCTGGGAGGCAAGGCC |
| | | | | GCTCTGACCCTGTCTGGCGTGCAGCCTGAGGACGAGGCCGAGTACTACTGTGTGC |
| | | | | TGTGGTACTCCAACAGATGGGTGTTCGGAGGCGGCACAAAGCTGACCGTGCTG |
| 941. | PM07A12-H | artificial | aa | QVQLVESGGGLVKPGGSLRLSCAASGFTFSDYYMSWVRQAPGKGLEWVASISDGGSN |
| | | | | TYYSDIIKGRFTISRDNAKNNLYLQMNSLRAEDTAVYYCARGFPLLRHGAFDYWGQGTL |
| | | | | VTVSS |
| 942. | PM07A12-HCDR1 | artificial | aa | DYYMS |
| 943. | PM07A12-HCDR2 | artificial | aa | SISDGGSNTYYSDIIKG |
| 944. | PM07A12-HCDR3 | artificial | aa | GFPLLRHGAFDY |
| 945. | PM07A12-H | artificial | nt | CAGGTGCAGCTGGTCGAGTCTGGCGGCGGACTGGTGAAGCCTGGCGGGTCCCTG |
| | | | | AGGCTGTCCTGTGCCGCCTCCGGCTTCACCTTCTCCGACTACTACATGAGCTGGGT |
| | | | | CCGCCAGGCCCCTGGGAAGGGGCTGGAATGGGTGGCCTCCATCTCCGACGGCGG |
| | | | | CTCCAACACCTACTACTCCGACATCATCAAGGGCCGGTTCACCATCTCCCGGGACA |
| | | | | ACGCCAAGAACAATCTGTACCTGCAGATGAACTCCCTGAGGGCCGAGGACACCGC |
| | | | | CGTGTACTACTGCGCCCGGGGCTTCCCTCTGCTGAGACACGGCGCCTTCGATTACT |
| | | | | GGGGCCAGGGCACCCTGGTCACCGTCTCCTCA |
| 946. | PM07A12-L | artificial | aa | DIQMTQSPSSLSASVGDRVTITCRASQNVDTNVAWYQQKPGQAPKSLIYSATYRYSDV |
| | | | | PSRFSGSASGTDFTLTISSVQSEDFATYYCQQYNSYPYTFGGGTKLEIK |
| 947. | PM07A12-LCDR1 | artificial | aa | RASQNVDTNVA |
| 948. | PM07A12-LCDR2 | artificial | aa | SATYRYS |
| 949. | PM07A12-LCDR3 | artificial | aa | QQYNSYPYT |
| 950. | PM07A12-L | artificial | nt | GACATCCAGATGACCCAGTCCCCCAGCTCCCTGTCCGCCTCCGTGGGCGACAGAG |
| | | | | TGACCATCACCTGCAGGGCCTCCCAGAACGTGGACACCAACGTGGCCTGGTATCA |
| | | | | GCAGAAGCCCGGCCAGGCCCCTAAGTCCCTGATCTACTCCGCCACCTACCGGTAC |
| | | | | TCTGACGTGCCTTCCCGGTTCTCCGGCTCCGCGTCCGGCACCGACTTCACCCTGA |
| | | | | CCATCTCCAGCGTGCAGTCTGAGGACTTCGCCACGTACTACTGCCAGCAGTACAAC |
| | | | | TCCTACCCTTACACCTTCGGCGGAGGGACCAAGCTGGAAATCAAG |
| 951. | PM07A12-HL | artificial | aa | QVQLVESGGGLVKPGGSLRLSCAASGFTFSDYYMSWVRQAPGKGLEWVASISDGGSN |
| | | | | TYYSDIIKGRFTISRDNAKNNLYLQMNSLRAEDTAVYYCARGFPLLRHGAFDYWGQGTL |
| | | | | VTVSSGGGGSGGGGSGGGGSDIQMTQSPSSLSASVGDRVTITCRASQNVDTNVAWY |
| | | | | QQKPGQAPKSLIYSATYRYSDVPSRFSGSASGTDFTLTISSVQSEDFATYYCQQYNSYP |
| | | | | YTFGGGTKLEIK |
| 952. | PM07A12-HL | artificial | nt | CAGGTGCAGCTGGTCGAGTCTGGCGGCGGACTGGTGAAGCCTGGCGGGTCCCTG |
| | | | | AGGCTGTCCTGTGCCGCCTCCGGCTTCACCTTCTCCGACTACTACATGAGCTGGGT |
| | | | | CCGCCAGGCCCCTGGGAAGGGGCTGGAATGGGTGGCCTCCATCTCCGACGGCGG |
| | | | | CTCCAACACCTACTACTCCGACATCATCAAGGGCCGGTTCACCATCTCCCGGGACA |
| | | | | ACGCCAAGAACAATCTGTACCTGCAGATGAACTCCCTGAGGGCCGAGGACACCGC |
| | | | | CGTGTACTACTGCGCCCGGGGCTTCCCTCTGCTGAGACACGGCGCCTTCGATTACT |
| | | | | GGGGCCAGGGCACCCTGGTCACCGTCTCCTCAGGTGGTGGTGGTTCTGGCGGCG |
| | | | | GCGGCTCCGGTGGTGGTGGTTCTGACATCCAGATGACCCAGTCCCCCAGCTCCCT |
| | | | | GTCCGCCTCCGTGGGCGACAGAGTGACCATCACCTGCAGGGCCTCCCAGAACGTG |
| | | | | GACACCAACGTGGCCTGGTATCAGCAGAAGCCCGGCCAGGCCCCTAAGTCCCTGA |
| | | | | TCTACTCCGCCACCTACCGGTACTCTGACGTGCCTTCCCGGTTCTCCGGCTCCGCG |
| | | | | TCCGGCACCGACTTCACCCTGACCATCTCCAGCGTGCAGTCTGAGGACTTCGCCAC |
| | | | | GTACTACTGCCAGCAGTACAACTCCTACCCTTACACCTTCGGCGGAGGGACCAAGC |
| | | | | TGGAAATCAAG |
| 953. | PM07A12 HL X | artificial | aa | QVQLVESGGGLVKPGGSLRLSCAASGFTFSDYYMSWVRQAPGKGLEWVASISDGGSN |
| | I2C HL | | | TYYSDIIKGRFTISRDNAKNNLYLQMNSLRAEDTAVYYCARGFPLLRHGAFDYWGQGTL |
| | | | | VTVSSGGGGSGGGGSGGGGSDIQMTQSPSSLSASVGDRVTITCRASQNVDTNVAWY |
| | | | | QQKPGQAPKSLIYSATYRYSDVPSRFSGSASGTDFTLTISSVQSEDFATYYCQQYNSYP |
| | | | | YTFGGGTKLEIKSGGGGSEVQLVESGGGLVQPGGSLKLSCAASGFTFNKYAMNWVRQ |
| | | | | APGKGLEWVARIRSKYNNYATYYADSVKDRFTISRDDSKNTAYLQMNNLKTEDTAVYY |
| | | | | CVRHGNFGNSYISYWAYWGQGTLVTVSSGGGGSGGGGSGGGGSQTVVTQEPSLTVS |
| | | | | PGGTVTLTCGSSTGAVTSGNYPNWVQQKPGQAPRGLIGGTKFLAPGTPARFSGSLLG |
| | | | | GKAALTLSGVQPEDEAEYYCVLWYSNRWVFGGGTKLTVL |
| 954. | PM07A12 HL X | artificial | nt | CAGGTGCAGCTGGTCGAGTCTGGCGGCGGACTGGTGAAGCCTGGCGGGTCCCTG |
| | I2C HL | | | AGGCTGTCCTGTGCCGCCTCCGGCTTCACCTTCTCCGACTACTACATGAGCTGGGT |
| | | | | CCGCCAGGCCCCTGGGAAGGGGCTGGAATGGGTGGCCTCCATCTCCGACGGCGG |
| | | | | CTCCAACACCTACTACTCCGACATCATCAAGGGCCGGTTCACCATCTCCCGGGACA |
| | | | | ACGCCAAGAACAATCTGTACCTGCAGATGAACTCCCTGAGGGCCGAGGACACCGC |
| | | | | CGTGTACTACTGCGCCCGGGGCTTCCCTCTGCTGAGACACGGCGCCTTCGATTACT |
| | | | | GGGGCCAGGGCACCCTGGTCACCGTCTCCTCAGGTGGTGGTGGTTCTGGCGGCG |
| | | | | GCGGCTCCGGTGGTGGTGGTTCTGACATCCAGATGACCCAGTCCCCCAGCTCCCT |
| | | | | GTCCGCCTCCGTGGGCGACAGAGTGACCATCACCTGCAGGGCCTCCCAGAACGTG |
| | | | | GACACCAACGTGGCCTGGTATCAGCAGAAGCCCGGCCAGGCCCCTAAGTCCCTGA |
| | | | | TCTACTCCGCCACCTACCGGTACTCTGACGTGCCTTCCCGGTTCTCCGGCTCCGCG |
| | | | | TCCGGCACCGACTTCACCCTGACCATCTCCAGCGTGCAGTCTGAGGACTTCGCCAC |
| | | | | GTACTACTGCCAGCAGTACAACTCCTACCCTTACACCTTCGGCGGAGGGACCAAGC |
| | | | | TGGAAATCAAGTCCGGAGGTGGTGGATCCGAGGTGCAGCTGGTCGAGTCTGGAGG |
| | | | | AGGATTGGTGCAGCCTGGAGGGTCATTGAAACTCTCATGTGCAGCCTCTGGATTCA |
| | | | | CCTTCAATAAGTACGCCATGAACTGGGTCCGCCAGGCTCCAGGAAAGGGTTTGGAA |
| | | | | TGGGTTGCTCGCATAAGAAGTAAATATAATAATTATGCAACATATTATGCCGATTCAG |
| | | | | TGAAAGACAGGTTCACCATCTCCAGAGATGATTCAAAAAACACTGCCTATCTACAAA |
| | | | | TGAACAACTTGAAAACTGAGGACACTGCCGTGTACTACTGTGTGAGACATGGGAAC |
| | | | | TTCGGTAATAGCTACATATCCTACTGGGCTTACTGGGGCCAAGGGACTCTGGTCAC |
| | | | | CGTCTCCTCAGGTGGTGGTGGTTCTGGCGGCGGCGGCTCCGGTGGTGGTGGTTCT |
| | | | | CAGACTGTTGTGACTCAGGAACCTTCACTCACCGTATCACCTGGTGGAACAGTCAC |
| | | | | ACTCACTTGTGGCTCCTCGACTGGGGCTGTTACATCTGGCAACTACCCAAACTGGG |
| | | | | TCCAACAAAAACCAGGTCAGGCACCCCGTGGTCTAATAGGTGGGACTAAGTTCCTC |
| | | | | GCCCCCGGTACTCCTGCCAGATTCTCAGGCTCCCTGCTTGGAGGCAAGGCTGCCC |
| | | | | TCACCCTCTCAGGGGTACAGCCAGAGGATGAGGCAGAATATTACTGTGTTCTATGG |
| | | | | TACAGCAACCGCTGGGTGTTCGGTGGAGGAACCAAACTGACTGTCCTA |
| 955. | PM07A12-H | artificial | nt | CAGGTGCAGCTGGTCGAGTCTGGCGGCGGACTGGTCAAGCCTGGCGGCTCCCTG |
| | codon optimized | | | AGACTGTCTTGCGCTGCCTCCGGCTTCACCTTCTCCGACTACTACATGTCCTGGGT |
| | | | | CCGCCAGGCTCCTGGCAAGGGACTGGAATGGGTGGCCTCCATCTCCGACGGCGG |
| | | | | CTCCAACACCTACTACTCCGACATCATCAAGGGCCGGTTCACCATCTCCAGGGACA |
| | | | | ACGCTAAGAACAACCTGTACCTGCAGATGAACTCCCTGAGGGCCGAGGACACCGC |
| | | | | CGTGTACTACTGCGCCAGGGGCTTCCCACTGCTGAGACACGGCGCCTTCGATTACT |
| | | | | GGGGCCAGGGCACCCTGGTCACAGTGTCCTCT |
| 956. | PM07A12-L | artificial | nt | GACATCCAGATGACCCAGTCCCCATCCTCCCTGTCTGCCTCCGTGGGCGACAGAGT |
| | codon optimized | | | GACCATCACATGCCGGGCCTCCCAGAACGTGGACACCAACGTGGCATGGTATCAG |
| | | | | CAGAAGCCAGGCCAGGCCCCTAAGTCCCTGATCTACTCTGCCACCTACCGGTACTC |
| | | | | CGACGTGCCCTCCAGGTTCTCTGGCTCCGCCTCTGGCACCGACTTCACCCTGACCA |
| | | | | TCTCTTCCGTGCAGTCCGAGGACTTCGCTACCTACTACTGCCAGCAGTACAACTCC |
| | | | | TACCCTTACACCTTCGGCGGAGGCACCAAGCTGGAAATCAAG |
| 957. | PM07A12-HL | artificial | nt | CAGGTGCAGCTGGTCGAGTCTGGCGGCGGACTGGTCAAGCCTGGCGGCTCCCTG |
| | codon optimized | | | AGACTGTCTTGCGCTGCCTCCGGCTTCACCTTCTCCGACTACTACATGTCCTGGGT |
| | | | | CCGCCAGGCTCCTGGCAAGGGACTGGAATGGGTGGCCTCCATCTCCGACGGCGG |
| | | | | CTCCAACACCTACTACTCCGACATCATCAAGGGCCGGTTCACCATCTCCAGGGACA |
| | | | | ACGCTAAGAACAACCTGTACCTGCAGATGAACTCCCTGAGGGCCGAGGACACCGC |
| | | | | CGTGTACTACTGCGCCAGGGGCTTCCCACTGCTGAGACACGGCGCCTTCGATTACT |
| | | | | GGGGCCAGGGCACCCTGGTCACAGTGTCCTCTGGCGGAGGCGGAAGTGGAGGCG |
| | | | | GAGGAAGCGGAGGCGGCGGATCCGACATCCAGATGACCCAGTCCCCATCCTCCCT |
| | | | | GTCTGCCTCCGTGGGCGACAGAGTGACCATCACATGCCGGGCCTCCCAGAACGTG |
| | | | | GACACCAACGTGGCATGGTATCAGCAGAAGCCAGGCCAGGCCCCTAAGTCCCTGA |
| | | | | TCTACTCTGCCACCTACCGGTACTCCGACGTGCCCTCCAGGTTCTCTGGCTCCGCC |
| | | | | TCTGGCACCGACTTCACCCTGACCATCTCTTCCGTGCAGTCCGAGGACTTCGCTAC |
| | | | | CTACTACTGCCAGCAGTACAACTCCTACCCTTACACCTTCGGCGGAGGCACCAAGC |
| | | | | TGGAAATCAAG |
| 958. | PM07A12 HL x | artificial | nt | CAGGTGCAGCTGGTCGAGTCTGGCGGCGGACTGGTCAAGCCTGGCGGCTCCCTG |
| | I2C HL codon | | | AGACTGTCTTGCGCTGCCTCCGGCTTCACCTTCTCCGACTACTACATGTCCTGGGT |
| | optimized | | | CCGCCAGGCTCCTGGCAAGGGACTGGAATGGGTGGCCTCCATCTCCGACGGCGG |
| | | | | CTCCAACACCTACTACTCCGACATCATCAAGGGCCGGTTCACCATCTCCAGGGACA |
| | | | | ACGCTAAGAACAACCTGTACCTGCAGATGAACTCCCTGAGGGCCGAGGACACCGC |
| | | | | CGTGTACTACTGCGCCAGGGGCTTCCCACTGCTGAGACACGGCGCCTTCGATTACT |
| | | | | GGGGCCAGGGCACCCTGGTCACAGTGTCCTCTGGCGGAGGCGGAAGTGGAGGCG |
| | | | | GAGGAAGCGGAGGCGGCGGATCCGACATCCAGATGACCCAGTCCCCATCCTCCCT |
| | | | | GTCTGCCTCCGTGGGCGACAGAGTGACCATCACATGCCGGGCCTCCCAGAACGTG |
| | | | | GACACCAACGTGGCATGGTATCAGCAGAAGCCAGGCCAGGCCCCTAAGTCCCTGA |
| | | | | TCTACTCTGCCACCTACCGGTACTCCGACGTGCCCTCCAGGTTCTCTGGCTCCGCC |
| | | | | TCTGGCACCGACTTCACCCTGACCATCTCTTCCGTGCAGTCCGAGGACTTCGCTAC |
| | | | | CTACTACTGCCAGCAGTACAACTCCTACCCTTACACCTTCGGCGGAGGCACCAAGC |
| | | | | TGGAAATCAAGTCCGGCGGAGGGGGCTCTGAAGTGCAGCTGGTGGAAAGCGGAG |
| | | | | GGGGACTGGTGCAGCCCGGGGGAAGTCTGAAGCTGTCCTGTGCCGCCAGCGGCT |
| | | | | TTACCTTCAACAAGTACGCCATGAATTGGGTCCGACAGGCCCCAGGGAAAGGCCTG |
| | | | | GAATGGGTGGCACGGATCCGGTCCAAGTACAACAACTACGCCACCTACTACGCTGA |
| | | | | CTCCGTGAAGGACAGATTCACCATCAGCCGGGACGACTCTAAGAACACCGCCTATC |
| | | | | TGCAGATGAACAACCTGAAAACCGAGGATACAGCTGTGTACTATTGTGTGCGGCAC |
| | | | | GGCAACTTCGGCAACTCCTACATCTCCTACTGGGCCTATTGGGGACAGGGAACACT |
| | | | | GGTCACCGTGTCTAGCGGAGGTGGCGGAAGTGGGGGAGGCGGATCTGGCGGTGG |
| | | | | CGGATCCCAGACCGTGGTCACCCAGGAACCTTCCCTGACCGTCTCCCCAGGCGGC |
| | | | | ACCGTGACCCTGACCTGTGGCTCCTCTACCGGCGCTGTGACCTCCGGCAACTACC |
| | | | | CTAACTGGGTGCAGCAGAAACCCGGACAGGCTCCTAGAGGCCTGATCGGCGGCAC |
| | | | | CAAGTTTCTGGCCCCTGGCACCCCTGCCAGATTCTCCGGCTCCCTGCTGGGAGGC |
| | | | | AAGGCCGCTCTGACCCTGTCTGGCGTGCAGCCTGAGGACGAGGCCGAGTACTACT |
| | | | | GTGTGCTGTGGTACTCCAACAGATGGGTGTTCGGAGGCGGCACAAAGCTGACCGT |
| | | | | GCTG |
| 959. | PM07F8-H | artificial | aa | QVQLVESGGGLVKPGESLRLSCAASGFTFSDYYMSWVRQAPGKGLEWVASISDGGSN |
| | | | | TYYSDIIKGRFTISRDNAKNSLYLQMNSLKAEDTAVYYCARGFPLLRHGAFDYWGQGTL |
| | | | | VTVSS |
| 960. | PM07F8-HCDR1 | artificial | aa | DYYMS |
| 961. | PM07F8-HCDR2 | artificial | aa | SISDGGSNTYYSDIIKG |
| 962. | PM07F8-HCDR3 | artificial | aa | GFPLLRHGAFDY |
| 963. | PM07F8-H | artificial | nt | CAGGTGCAGCTGGTCGAGTCTGGCGGCGGACTGGTGAAGCCTGGCGAGTCCCTG |
| | | | | AGGCTGTCCTGTGCCGCCTCCGGCTTCACCTTCTCCGACTACTACATGAGCTGGGT |
| | | | | CCGCCAGGCCCCTGGGAAGGGGCTGGAATGGGTGGCCTCCATCTCCGACGGCGG |
| | | | | CTCCAACACCTACTACTCCGACATCATCAAGGGCCGGTTCACCATCTCCCGGGACA |
| | | | | ACGCCAAGAACAGCCTGTACCTGCAGATGAACTCCCTGAAGGCCGAGGACACCGC |
| | | | | CGTGTACTACTGCGCCCGGGGCTTCCCTCTGCTGAGACACGGCGCCTTCGATTACT |
| | | | | GGGGCCAGGGCACCCTGGTCACCGTCTCCTCA |
| 964. | PM07F8-L | artificial | aa | DIQMTQSPSSLSASVGDRVTITCRASQNVDTNVAWYQQKPGQAPKSLIYSATYRYSDV |
| | | | | PSRFSGSASGTDFTLTISSVQSEDFATYYCQQYNSYPYTFGGGTKLEIK |
| 965. | PM07F8-LCDR1 | artificial | aa | RASQNVDTNVA |
| 966. | PM07F8-LCDR2 | artificial | aa | SATYRYS |
| 967. | PM07F8-LCDR3 | artificial | aa | QQYNSYPYT |
| 968. | PM07F8-L | artificial | nt | GACATCCAGATGACCCAGTCCCCCAGCTCCCTGTCCGCCTCCGTGGGCGACAGAG |
| | | | | TGACCATCACCTGCAGGGCCTCCCAGAACGTGGACACCAACGTGGCCTGGTATCA |
| | | | | GCAGAAGCCCGGCCAGGCCCCTAAGTCCCTGATCTACTCCGCCACCTACCGGTAC |
| | | | | TCTGACGTGCCTTCCCGGTTCTCCGGCTCCGCGTCCGGCACCGACTTCACCCTGA |
| | | | | CCATCTCCAGCGTGCAGTCTGAGGACTTCGCCACGTACTACTGCCAGCAGTACAAC |
| | | | | TCCTACCCTTACACCTTCGGCGGAGGGACCAAGCTGGAAATCAAG |
| 969. | PM07F8-HL | artificial | aa | QVQLVESGGGLVKPGESLRLSCAASGFTFSDYYMSWVRQAPGKGLEWVASISDGGSN |
| | | | | TYYSDIIKGRFTISRDNAKNSLYLQMNSLKAEDTAVYYCARGFPLLRHGAFDYWGQGTL |
| | | | | VTVSSGGGGSGGGGSGGGGSDIQMTQSPSSLSASVGDRVTITCRASQNVDTNVAWY |
| | | | | QQKPGQAPKSLIYSATYRYSDVPSRFSGSASGTDFTLTISSVQSEDFATYYCQQYNSYP |
| | | | | YTFGGGTKLEIK |
| 970. | PM07F8-HL | artificial | nt | CAGGTGCAGCTGGTCGAGTCTGGCGGCGGACTGGTGAAGCCTGGCGAGTCCCTG |
| | | | | AGGCTGTCCTGTGCCGCCTCCGGCTTCACCTTCTCCGACTACTACATGAGCTGGGT |
| | | | | CCGCCAGGCCCCTGGGAAGGGGCTGGAATGGGTGGCCTCCATCTCCGACGGCGG |
| | | | | CTCCAACACCTACTACTCCGACATCATCAAGGGCCGGTTCACCATCTCCCGGGACA |
| | | | | ACGCCAAGAACAGCCTGTACCTGCAGATGAACTCCCTGAAGGCCGAGGACACCGC |
| | | | | CGTGTACTACTGCGCCCGGGGCTTCCCTCTGCTGAGACACGGCGCCTTCGATTACT |
| | | | | GGGGCCAGGGCACCCTGGTCACCGTCTCCTCAGGTGGTGGTGGTTCTGGCGGCG |
| | | | | GCGGCTCCGGTGGTGGTGGTTCTGACATCCAGATGACCCAGTCCCCCAGCTCCCT |
| | | | | GTCCGCCTCCGTGGGCGACAGAGTGACCATCACCTGCAGGGCCTCCCAGAACGTG |
| | | | | GACACCAACGTGGCCTGGTATCAGCAGAAGCCCGGCCAGGCCCCTAAGTCCCTGA |
| | | | | TCTACTCCGCCACCTACCGGTACTCTGACGTGCCTTCCCGGTTCTCCGGCTCCGCG |
| | | | | TCCGGCACCGACTTCACCCTGACCATCTCCAGCGTGCAGTCTGAGGACTTCGCCAC |
| | | | | GTACTACTGCCAGCAGTACAACTCCTACCCTTACACCTTCGGCGGAGGGACCAAGC |
| | | | | TGGAAATCAAG |
| 971. | PM07F8 HL X | artificial | aa | QVQLVESGGGLVKPGESLRLSCAASGFTFSDYYMSWVRQAPGKGLEWVASISDGGSN |
| | I2C HL | | | TYYSDIIKGRFTISRDNAKNSLYLQMNSLKAEDTAVYYCARGFPLLRHGAFDYWGQGTL |
| | | | | VTVSSGGGGSGGGGSGGGGSDIQMTQSPSSLSASVGDRVTITCRASQNVDTNVAWY |
| | | | | QQKPGQAPKSLIYSATYRYSDVPSRFSGSASGTDFTLTISSVQSEDFATYYCQQYNSYP |
| | | | | YTFGGGTKLEIKSGGGGSEVQLVESGGGLVQPGGSLKLSCAASGFTFNKYAMNWVRQ |
| | | | | APGKGLEWVARIRSKYNNYATYYADSVKDRFTISRDDSKNTAYLQMNNLKTEDTAVYY |
| | | | | CVRHGNFGNSYISYWAYWGQGTLVTVSSGGGGSGGGGSGGGGSQTVVTQEPSLTVS |
| | | | | PGGTVTLTCGSSTGAVTSGNYPNWVQQKPGQAPRGLIGGTKFLAPGTPARFSGSLLG |
| | | | | GKAALTLSGVQPEDEAEYYCVLWYSNRWVFGGGTKLTVL |
| 972. | PM07F8 HL X | artificial | nt | CAGGTGCAGCTGGTCGAGTCTGGCGGCGGACTGGTGAAGCCTGGCGAGTCCCTG |
| | I2C HL | | | AGGCTGTCCTGTGCCGCCTCCGGCTTCACCTTCTCCGACTACTACATGAGCTGGGT |
| | | | | CCGCCAGGCCCCTGGGAAGGGGCTGGAATGGGTGGCCTCCATCTCCGACGGCGG |
| | | | | CTCCAACACCTACTACTCCGACATCATCAAGGGCCGGTTCACCATCTCCCGGGACA |
| | | | | ACGCCAAGAACAGCCTGTACCTGCAGATGAACTCCCTGAAGGCCGAGGACACCGC |
| | | | | CGTGTACTACTGCGCCCGGGGCTTCCCTCTGCTGAGACACGGCGCCTTCGATTACT |
| | | | | GGGGCCAGGGCACCCTGGTCACCGTCTCCTCAGGTGGTGGTGGTTCTGGCGGCG |
| | | | | GCGGCTCCGGTGGTGGTGGTTCTGACATCCAGATGACCCAGTCCCCCAGCTCCCT |
| | | | | GTCCGCCTCCGTGGGCGACAGAGTGACCATCACCTGCAGGGCCTCCCAGAACGTG |
| | | | | GACACCAACGTGGCCTGGTATCAGCAGAAGCCCGGCCAGGCCCCTAAGTCCCTGA |
| | | | | TCTACTCCGCCACCTACCGGTACTCTGACGTGCCTTCCCGGTTCTCCGGCTCCGCG |
| | | | | TCCGGCACCGACTTCACCCTGACCATCTCCAGCGTGCAGTCTGAGGACTTCGCCAC |
| | | | | GTACTACTGCCAGCAGTACAACTCCTACCCTTACACCTTCGGCGGAGGGACCAAGC |
| | | | | TGGAAATCAAGTCCGGAGGTGGTGGATCCGAGGTGCAGCTGGTCGAGTCTGGAGG |
| | | | | AGGATTGGTGCAGCCTGGAGGGTCATTGAAACTCTCATGTGCAGCCTCTGGATTCA |
| | | | | CCTTCAATAAGTACGCCATGAACTGGGTCCGCCAGGCTCCAGGAAAGGGTTTGGAA |
| | | | | TGGGTTGCTCGCATAAGAAGTAAATATAATAATTATGCAACATATTATGCCGATTCAG |
| | | | | TGAAAGACAGGTTCACCATCTCCAGAGATGATTCAAAAAACACTGCCTATCTACAAA |
| | | | | TGAACAACTTGAAAACTGAGGACACTGCCGTGTACTACTGTGTGAGACATGGGAAC |
| | | | | TTCGGTAATAGCTACATATCCTACTGGGCTTACTGGGGCCAAGGGACTCTGGTCAC |
| | | | | CGTCTCCTCAGGTGGTGGTGGTTCTGGCGGCGGCGGCTCCGGTGGTGGTGGTTCT |
| | | | | CAGACTGTTGTGACTCAGGAACCTTCACTCACCGTATCACCTGGTGGAACAGTCAC |
| | | | | ACTCACTTGTGGCTCCTCGACTGGGGCTGTTACATCTGGCAACTACCCAAACTGGG |
| | | | | TCCAACAAAAACCAGGTCAGGCACCCCGTGGTCTAATAGGTGGGACTAAGTTCCTC |
| | | | | GCCCCCGGTACTCCTGCCAGATTCTCAGGCTCCCTGCTTGGAGGCAAGGCTGCCC |
| | | | | TCACCCTCTCAGGGGTACAGCCAGAGGATGAGGCAGAATATTACTGTGTTCTATGG |
| | | | | TACAGCAACCGCTGGGTGTTCGGTGGAGGAACCAAACTGACTGTCCTA |
| 973. | PM07F8-H | artificial | nt | CAGGTGCAGCTGGTCGAGTCTGGCGGCGGACTGGTCAAGCCTGGCGAGTCCCTGA |
| | codon optimized | | | GACTGTCTTGCGCTGCCTCCGGCTTCACCTTCTCCGACTACTACATGTCCTGGGTC |
| | | | | CGCCAGGCTCCTGGCAAGGGACTGGAATGGGTGGCCTCCATCTCCGACGGCGGCT |
| | | | | CCAACACCTACTACTCCGACATCATCAAGGGCCGGTTCACCATCTCCAGGGACAAC |
| | | | | GCCAAGAACTCCCTGTACCTGCAGATGAACTCCCTGAAGGCCGAGGACACCGCCG |
| | | | | TGTACTACTGCGCCAGGGGCTTCCCACTGCTGAGACACGGCGCCTTCGATTACTGG |
| | | | | GGCCAGGGCACCCTGGTCACAGTGTCCTCT |
| 974. | PM07F8-H | artificial | nt | GACATCCAGATGACCCAGTCCCCATCCTCCCTGTCTGCCTCCGTGGGCGACAGAGT |
| | codon optimized | | | GACCATCACATGCCGGGCCTCCCAGAACGTGGACACCAACGTGGCATGGTATCAG |
| | | | | CAGAAGCCAGGCCAGGCCCCTAAGTCCCTGATCTACTCTGCCACCTACCGGTACTC |
| | | | | CGACGTGCCCTCCAGGTTCTCTGGCTCCGCCTCTGGCACCGACTTCACCCTGACCA |
| | | | | TCTCTTCCGTGCAGTCCGAGGACTTCGCTACCTACTACTGCCAGCAGTACAACTCC |
| | | | | TACCCTTACACCTTCGGCGGAGGCACCAAGCTGGAAATCAAG |
| 975. | PM07F8-H | artificial | nt | CAGGTGCAGCTGGTCGAGTCTGGCGGCGGACTGGTCAAGCCTGGCGAGTCCCTGA |
| | codon optimized | | | GACTGTCTTGCGCTGCCTCCGGCTTCACCTTCTCCGACTACTACATGTCCTGGGTC |
| | | | | CGCCAGGCTCCTGGCAAGGGACTGGAATGGGTGGCCTCCATCTCCGACGGCGGCT |
| | | | | CCAACACCTACTACTCCGACATCATCAAGGGCCGGTTCACCATCTCCAGGGACAAC |
| | | | | GCCAAGAACTCCCTGTACCTGCAGATGAACTCCCTGAAGGCCGAGGACACCGCCG |
| | | | | TGTACTACTGCGCCAGGGGCTTCCCACTGCTGAGACACGGCGCCTTCGATTACTGG |
| | | | | GGCCAGGGCACCCTGGTCACAGTGTCCTCTGGCGGAGGCGGAAGTGGAGGCGGA |
| | | | | GGAAGCGGAGGCGGCGGATCCGACATCCAGATGACCCAGTCCCCATCCTCCCTGT |
| | | | | CTGCCTCCGTGGGCGACAGAGTGACCATCACATGCCGGGCCTCCCAGAACGTGGA |
| | | | | CACCAACGTGGCATGGTATCAGCAGAAGCCAGGCCAGGCCCCTAAGTCCCTGATC |
| | | | | TACTCTGCCACCTACCGGTACTCCGACGTGCCCTCCAGGTTCTCTGGCTCCGCCTC |
| | | | | TGGCACCGACTTCACCCTGACCATCTCTTCCGTGCAGTCCGAGGACTTCGCTACCT |
| | | | | ACTACTGCCAGCAGTACAACTCCTACCCTTACACCTTCGGCGGAGGCACCAAGCTG |
| | | | | GAAATCAAG |
| 976. | PM07F8 HL x | artificial | nt | CAGGTGCAGCTGGTCGAGTCTGGCGGCGGACTGGTCAAGCCTGGCGAGTCCCTGA |
| | I2C HL codon optimized | | | GACTGTCTTGCGCTGCCTCCGGCTTCACCTTCTCCGACTACTACATGTCCTGGGTC |
| | | | | CGCCAGGCTCCTGGCAAGGGACTGGAATGGGTGGCCTCCATCTCCGACGGCGGCT |
| | | | | CCAACACCTACTACTCCGACATCATCAAGGGCCGGTTCACCATCTCCAGGGACAAC |
| | | | | GCCAAGAACTCCCTGTACCTGCAGATGAACTCCCTGAAGGCCGAGGACACCGCCG |
| | | | | TGTACTACTGCGCCAGGGGCTTCCCACTGCTGAGACACGGCGCCTTCGATTACTGG |
| | | | | GGCCAGGGCACCCTGGTCACAGTGTCCTCTGGCGGAGGCGGAAGTGGAGGCGGA |
| | | | | GGAAGCGGAGGCGGCGGATCCGACATCCAGATGACCCAGTCCCCATCCTCCCTGT |
| | | | | CTGCCTCCGTGGGCGACAGAGTGACCATCACATGCCGGGCCTCCCAGAACGTGGA |
| | | | | CACCAACGTGGCATGGTATCAGCAGAAGCCAGGCCAGGCCCCTAAGTCCCTGATC |
| | | | | TACTCTGCCACCTACCGGTACTCCGACGTGCCCTCCAGGTTCTCTGGCTCCGCCTC |
| | | | | TGGCACCGACTTCACCCTGACCATCTCTTCCGTGCAGTCCGAGGACTTCGCTACCT |
| | | | | ACTACTGCCAGCAGTACAACTCCTACCCTTACACCTTCGGCGGAGGCACCAAGCTG |
| | | | | GAAATCAAGTCCGGCGGAGGGGGCTCTGAAGTGCAGCTGGTGGAAAGCGGAGGG |
| | | | | GGACTGGTGCAGCCCGGGGGAAGTCTGAAGCTGTCCTGTGCCGCCAGCGGCTTTA |
| | | | | CCTTCAACAAGTACGCCATGAATTGGGTCCGACAGGCCCCAGGGAAAGGCCTGGA |
| | | | | ATGGGTGGCACGGATCCGGTCCAAGTACAACAACTACGCCACCTACTACGCTGACT |
| | | | | CCGTGAAGGACAGATTCACCATCAGCCGGGACGACTCTAAGAACACCGCCTATCTG |
| | | | | CAGATGAACAACCTGAAAACCGAGGATACAGCTGTGTACTATTGTGTGCGGCACGG |
| | | | | CAACTTCGGCAACTCCTACATCTCCTACTGGGCCTATTGGGGACAGGGAACACTGG |
| | | | | TCACCGTGTCTAGCGGAGGTGGCGGAAGTGGGGGAGGCGGATCTGGCGGTGGCG |
| | | | | GATCCCAGACCGTGGTCACCCAGGAACCTTCCCTGACCGTCTCCCCAGGCGGCAC |
| | | | | CGTGACCCTGACCTGTGGCTCCTCTACCGGCGCTGTGACCTCCGGCAACTACCCTA |
| | | | | ACTGGGTGCAGCAGAAACCCGGACAGGCTCCTAGAGGCCTGATCGGCGGCACCAA |
| | | | | GTTTCTGGCCCCTGGCACCCCTGCCAGATTCTCCGGCTCCCTGCTGGGAGGCAAG |
| | | | | GCCGCTCTGACCCTGTCTGGCGTGCAGCCTGAGGACGAGGCCGAGTACTACTGTG |
| | | | | TGCTGTGGTACTCCAACAGATGGGTGTTCGGAGGCGGCACAAAGCTGACCGTGCTG |
| 977. | PM07E5-H | artificial | aa | QVQLVESGGGLVKPGGSLRLSCAASGFTFSDYYMSWVRQAPGKGLEWVASISDGGSN |
| | | | | TYYSDIIKGRFTISRDNAKNNLYLQMNSLRAEDTAVYYCARGFPLLRHGAIDYWGQGTL |
| | | | | VTVSS |
| 978. | PM07E5-HCDR1 | artificial | aa | DYYMS |
| 979. | PM07E5-HCDR2 | artificial | aa | SISDGGSNTYYSDIIKG |
| 980. | PM07E5-HCDR3 | artificial | aa | GFPLLRHGAIDY |
| 981. | PM07E5-H | artificial | nt | CAGGTGCAGCTGGTCGAGTCTGGCGGCGGACTGGTGAAGCCTGGCGGGTCCCTG |
| | | | | AGGCTGTCCTGTGCCGCCTCCGGCTTCACCTTCTCCGACTACTACATGAGCTGGGT |
| | | | | CCGCCAGGCCCCTGGGAAGGGGCTGGAATGGGTGGCCTCCATCTCCGACGGCGG |
| | | | | CTCCAACACCTACTACTCCGACATCATCAAGGGCCGGTTCACCATCTCCCGAGACA |
| | | | | ACGCCAAGAACAATCTGTACCTGCAGATGAACTCCCTGAGGGCCGAGGACACCGC |
| | | | | CGTGTACTACTGCGCCCGGGGCTTCCCTCTGCTGAGACACGGCGCCATCGATTACT |
| | | | | GGGGCCAGGGCACCCTGGTCACCGTCTCCTCA |
| 982. | PM07E5-L | artificial | aa | DIQMTQSPSSLSASVGDRVTITCRASQNVDTNVAWYQQKPGQAPKSLIYSATYRYSDV |
| | | | | PSRFSGSASGTDFTLTISSVQSEDFATYYCQQYNSYPYTFGGGTKLEIK |
| 983. | PM07E5-LCDR1 | artificial | aa | RASQNVDTNVA |
| 984. | PM07E5-LCDR2 | artificial | aa | SATYRYS |
| 985. | PM07E5-LCDR3 | artificial | aa | QQYNSYPYT |
| 986. | PM07E5-L | artificial | nt | GACATCCAGATGACCCAGTCCCCCAGCTCCCTGTCCGCCTCCGTGGGCGACAGAG |
| | | | | TGACCATCACCTGCAGGGCCTCCCAGAACGTGGACACCAACGTGGCCTGGTATCA |
| | | | | GCAGAAGCCCGGCCAGGCCCCTAAGTCCCTGATCTACTCCGCCACCTACCGGTAC |
| | | | | TCTGACGTGCCTTCCCGGTTCTCCGGCTCCGCGTCCGGCACCGACTTCACCCTGA |
| | | | | CCATCTCCAGCGTGCAGTCTGAGGACTTCGCCACGTACTACTGCCAGCAGTACAAC |
| | | | | TCCTACCCTTACACCTTCGGCGGAGGGACCAAGCTGGAAATCAAG |
| 987. | PM07E5-HL | artificial | aa | QVQLVESGGGLVKPGGSLRLSCAASGFTFSDYYMSWVRQAPGKGLEWVASISDGGSN |
| | | | | TYYSDIIKGRFTISRDNAKNNLYLQMNSLRAEDTAVYYCARGFPLLRHGAIDYWGQGTL |
| | | | | VTVSSGGGGSGGGGSGGGGSDIQMTQSPSSLSASVGDRVTITCRASQNVDTNVAWY |
| | | | | QQKPGQAPKSLIYSATYRYSDVPSRFSGSASGTDFTLTISSVQSEDFATYYCQQYNSYP |
| | | | | YTFGGGTKLEIK |
| 988. | PM07E5-HL | artificial | nt | CAGGTGCAGCTGGTCGAGTCTGGCGGCGGACTGGTGAAGCCTGGCGGGTCCCTG |
| | | | | AGGCTGTCCTGTGCCGCCTCCGGCTTCACCTTCTCCGACTACTACATGAGCTGGGT |
| | | | | CCGCCAGGCCCCTGGGAAGGGGCTGGAATGGGTGGCCTCCATCTCCGACGGCGG |
| | | | | CTCCAACACCTACTACTCCGACATCATCAAGGGCCGGTTCACCATCTCCCGAGACA |
| | | | | ACGCCAAGAACAATCTGTACCTGCAGATGAACTCCCTGAGGGCCGAGGACACCGC |
| | | | | CGTGTACTACTGCGCCCGGGGCTTCCCTCTGCTGAGACACGGCGCCATCGATTACT |
| | | | | GGGGCCAGGGCACCCTGGTCACCGTCTCCTCAGGTGGTGGTGGTTCTGGCGGCG |
| | | | | GCGGCTCCGGTGGTGGTGGTTCTGACATCCAGATGACCCAGTCCCCCAGCTCCCT |
| | | | | GTCCGCCTCCGTGGGCGACAGAGTGACCATCACCTGCAGGGCCTCCCAGAACGTG |
| | | | | GACACCAACGTGGCCTGGTATCAGCAGAAGCCCGGCCAGGCCCCTAAGTCCCTGA |
| | | | | TCTACTCCGCCACCTACCGGTACTCTGACGTGCCTTCCCGGTTCTCCGGCTCCGCG |
| | | | | TCCGGCACCGACTTCACCCTGACCATCTCCAGCGTGCAGTCTGAGGACTTCGCCAC |
| | | | | GTACTACTGCCAGCAGTACAACTCCTACCCTTACACCTTCGGCGGAGGGACCAAGC |
| | | | | TGGAAATCAAG |
| 989. | PM07E5 HL X | artificial | aa | QVQLVESGGGLVKPGGSLRLSCAASGFTFSDYYMSWVRQAPGKGLEWVASISDGGSN |
| | I2C HL | | | TYYSDIIKGRFTISRDNAKNNLYLQMNSLRAEDTAVYYCARGFPLLRHGAIDYWGQGTL |
| | | | | VTVSSGGGGSGGGGSGGGGSDIQMTQSPSSLSASVGDRVTITCRASQNVDTNVAWY |
| | | | | QQKPGQAPKSLIYSATYRYSDVPSRFSGSASGTDFTLTISSVQSEDFATYYCQQYNSYP |
| | | | | YTFGGGTKLEIKSGGGGSEVQLVESGGGLVQPGGSLKLSCAASGFTFNKYAMNWVRQ |
| | | | | APGKGLEWVARIRSKYNNYATYYADSVKDRFTISRDDSKNTAYLQMNNLKTEDTAVYY |
| | | | | CVRHGNFGNSYISYWAYWGQGTLVTVSSGGGGSGGGGSGGGGSQTVVTQEPSLTVS |
| | | | | PGGTVTLTCGSSTGAVTSGNYPNWVQQKPGQAPRGLIGGTKFLAPGTPARFSGSLLG |
| | | | | GKAALTLSGVQPEDEAEYYCVLWYSNRWVFGGGTKLTVL |
| 990. | PM07E5 HL X | artificial | nt | CAGGTGCAGCTGGTCGAGTCTGGCGGCGGACTGGTGAAGCCTGGCGGGTCCCTG |
| | I2C HL | | | AGGCTGTCCTGTGCCGCCTCCGGCTTCACCTTCTCCGACTACTACATGAGCTGGGT |
| | | | | CCGCCAGGCCCCTGGGAAGGGGCTGGAATGGGTGGCCTCCATCTCCGACGGCGG |
| | | | | CTCCAACACCTACTACTCCGACATCATCAAGGGCCGGTTCACCATCTCCCGAGACA |
| | | | | ACGCCAAGAACAATCTGTACCTGCAGATGAACTCCCTGAGGGCCGAGGACACCGC |
| | | | | CGTGTACTACTGCGCCCGGGGCTTCCCTCTGCTGAGACACGGCGCCATCGATTACT |
| | | | | GGGGCCAGGGCACCCTGGTCACCGTCTCCTCAGGTGGTGGTGGTTCTGGCGGCG |
| | | | | GCGGCTCCGGTGGTGGTGGTTCTGACATCCAGATGACCCAGTCCCCCAGCTCCCT |
| | | | | GTCCGCCTCCGTGGGCGACAGAGTGACCATCACCTGCAGGGCCTCCCAGAACGTG |
| | | | | GACACCAACGTGGCCTGGTATCAGCAGAAGCCCGGCCAGGCCCCTAAGTCCCTGA |
| | | | | TCTACTCCGCCACCTACCGGTACTCTGACGTGCCTTCCCGGTTCTCCGGCTCCGCG |
| | | | | TCCGGCACCGACTTCACCCTGACCATCTCCAGCGTGCAGTCTGAGGACTTCGCCAC |
| | | | | GTACTACTGCCAGCAGTACAACTCCTACCCTTACACCTTCGGCGGAGGGACCAAGC |
| | | | | TGGAAATCAAGTCCGGAGGTGGTGGATCCGAGGTGCAGCTGGTCGAGTCTGGAGG |
| | | | | AGGATTGGTGCAGCCTGGAGGGTCATTGAAACTCTCATGTGCAGCCTCTGGATTCA |
| | | | | CCTTCAATAAGTACGCCATGAACTGGGTCCGCCAGGCTCCAGGAAAGGGTTTGGAA |
| | | | | TGGGTTGCTCGCATAAGAAGTAAATATAATAATTATGCAACATATTATGCCGATTCAG |
| | | | | TGAAAGACAGGTTCACCATCTCCAGAGATGATTCAAAAAACACTGCCTATCTACAAA |
| | | | | TGAACAACTTGAAAACTGAGGACACTGCCGTGTACTACTGTGTGAGACATGGGAAC |
| | | | | TTCGGTAATAGCTACATATCCTACTGGGCTTACTGGGGCCAAGGGACTCTGGTCAC |
| | | | | CGTCTCCTCAGGTGGTGGTGGTTCTGGCGGCGGCGGCTCCGGTGGTGGTGGTTCT |
| | | | | CAGACTGTTGTGACTCAGGAACCTTCACTCACCGTATCACCTGGTGGAACAGTCAC |
| | | | | ACTCACTTGTGGCTCCTCGACTGGGGCTGTTACATCTGGCAACTACCCAAACTGGG |
| | | | | TCCAACAAAAACCAGGTCAGGCACCCCGTGGTCTAATAGGTGGGACTAAGTTCCTC |
| | | | | GCCCCCGGTACTCCTGCCAGATTCTCAGGCTCCCTGCTTGGAGGCAAGGCTGCCC |
| | | | | TCACCCTCTCAGGGGTACAGCCAGAGGATGAGGCAGAATATTACTGTGTTCTATGG |
| | | | | TACAGCAACCGCTGGGTGTTCGGTGGAGGAACCAAACTGACTGTCCTA |
| 991. | PM07D3-H | artificial | aa | QVQLVESGGGLVKPGESLRLSCAASGFTFSDYYMSWVRQAPGKGLEWVASISDGGSN |
| | | | | TYYSDIIKGRFTISRDNAKNSLYLQMNSLKAEDTAVYYCARGFPLLRHGAIDYWGQGTLV |
| | | | | TVSS |
| 992. | PM07D3-HCDR1 | artificial | aa | DYYMS |
| 993. | PM07D3-HCDR2 | artificial | aa | SISDGGSNTYYSDIIKG |
| 994. | PM07D3-HCDR3 | artificial | aa | GFPLLRHGAIDY |
| 995. | PM07D3-H | artificial | nt | CAGGTGCAGCTGGTCGAGTCTGGCGGCGGACTGGTGAAGCCTGGCGAGTCCCTG |
| | | | | AGGCTGTCCTGTGCCGCCTCCGGCTTCACCTTCTCCGACTACTACATGAGCTGGGT |
| | | | | CCGCCAGGCCCCTGGGAAGGGGCTGGAATGGGTGGCCTCCATCTCCGACGGCGG |
| | | | | CTCCAACACCTACTACTCCGACATCATCAAGGGCCGGTTCACCATCTCCCGAGACA |
| | | | | ACGCCAAGAACAGCCTGTACCTGCAGATGAACTCCCTGAAGGCCGAGGACACCGC |
| | | | | CGTGTACTACTGCGCCCGGGGCTTCCCTCTGCTGAGACACGGCGCCATCGATTACT |
| | | | | GGGGCCAGGGCACCCTGGTCACCGTCTCCTCA |
| 996. | PM07D3-L | artificial | aa | DIQMTQSPSSLSASVGDRVTITCRASQNVDTNVAWYQQKPGQAPKSLIYSATYRYSDV |
| | | | | PSRFSGSASGTDFTLTISSVQSEDFATYYCQQYNSYPYTFGGGTKLEIK |
| 997. | PM07D3-LCDR1 | artificial | aa | RASQNVDTNVA |
| 998. | PM07D3-LCDR2 | artificial | aa | SATYRYS |
| 999. | PM07D3-LCDR3 | artificial | aa | QQYNSYPYT |
| 1000. | PM07D3-L | artificial | nt | GACATCCAGATGACCCAGTCCCCCAGCTCCCTGTCCGCCTCCGTGGGCGACAGAG |
| | | | | TGACCATCACCTGCAGGGCCTCCCAGAACGTGGACACCAACGTGGCCTGGTATCA |
| | | | | GCAGAAGCCCGGCCAGGCCCCTAAGTCCCTGATCTACTCCGCCACCTACCGGTAC |
| | | | | TCTGACGTGCCTTCCCGGTTCTCCGGCTCCGCGTCCGGCACCGACTTCACCCTGA |
| | | | | CCATCTCCAGCGTGCAGTCTGAGGACTTCGCCACGTACTACTGCCAGCAGTACAAC |
| | | | | TCCTACCCTTACACCTTCGGCGGAGGGACCAAGCTGGAAATCAAG |
| 1001. | PM07D3-HL | artificial | aa | QVQLVESGGGLVKPGESLRLSCAASGFTFSDYYMSWVRQAPGKGLEWVASISDGGSN |
| | | | | TYYSDIIKGRFTISRDNAKNSLYLQMNSLKAEDTAVYYCARGFPLLRHGAIDYWGQGTLV |
| | | | | TVSSGGGGSGGGGSGGGGSDIQMTQSPSSLSASVGDRVTITCRASQNVDTNVAWYQ |
| | | | | QKPGQAPKSLIYSATYRYSDVPSRFSGSASGTDFTLTISSVQSEDFATYYCQQYNSYPY |
| | | | | TFGGGTKLEIK |
| 1002. | PM07D3-HL | artificial | nt | CAGGTGCAGCTGGTCGAGTCTGGCGGCGGACTGGTGAAGCCTGGCGAGTCCCTG |
| | | | | AGGCTGTCCTGTGCCGCCTCCGGCTTCACCTTCTCCGACTACTACATGAGCTGGGT |
| | | | | CCGCCAGGCCCCTGGGAAGGGGCTGGAATGGGTGGCCTCCATCTCCGACGGCGG |
| | | | | CTCCAACACCTACTACTCCGACATCATCAAGGGCCGGTTCACCATCTCCCGAGACA |
| | | | | ACGCCAAGAACAGCCTGTACCTGCAGATGAACTCCCTGAAGGCCGAGGACACCGC |
| | | | | CGTGTACTACTGCGCCCGGGGCTTCCCTCTGCTGAGACACGGCGCCATCGATTACT |
| | | | | GGGGCCAGGGCACCCTGGTCACCGTCTCCTCAGGTGGTGGTGGTTCTGGCGGCG |
| | | | | GCGGCTCCGGTGGTGGTGGTTCTGACATCCAGATGACCCAGTCCCCCAGCTCCCT |
| | | | | GTCCGCCTCCGTGGGCGACAGAGTGACCATCACCTGCAGGGCCTCCCAGAACGTG |
| | | | | GACACCAACGTGGCCTGGTATCAGCAGAAGCCCGGCCAGGCCCCTAAGTCCCTGA |
| | | | | TCTACTCCGCCACCTACCGGTACTCTGACGTGCCTTCCCGGTTCTCCGGCTCCGCG |
| | | | | TCCGGCACCGACTTCACCCTGACCATCTCCAGCGTGCAGTCTGAGGACTTCGCCAC |
| | | | | GTACTACTGCCAGCAGTACAACTCCTACCCTTACACCTTCGGCGGAGGGACCAAGC |
| | | | | TGGAAATCAAG |
| 1003. | PM07D3 HL X | artificial | aa | QVQLVESGGGLVKPGESLRLSCAASGFTFSDYYMSWVRQAPGKGLEWVASISDGGSN |
| | I2C HL | | | TYYSDIIKGRFTISRDNAKNSLYLQMNSLKAEDTAVYYCARGFPLLRHGAIDYWGQGTLV |
| | | | | TVSSGGGGSGGGGSGGGGSDIQMTQSPSSLSASVGDRVTITCRASQNVDTNVAWYQ |
| | | | | QKPGQAPKSLIYSATYRYSDVPSRFSGSASGTDFTLTISSVQSEDFATYYCQQYNSYPY |
| | | | | TFGGGTKLEIKSGGGGSEVQLVESGGGLVQPGGSLKLSCAASGFTFNKYAMNWVRQA |
| | | | | PGKGLEWVARIRSKYNNYATYYADSVKDRFTISRDDSKNTAYLQMNNLKTEDTAVYYC |
| | | | | VRHGNFGNSYISYWAYWGQGTLVTVSSGGGGSGGGGSGGGGSQTVVTQEPSLTVSP |
| | | | | GGTVTLTCGSSTGAVTSGNYPNWVQQKPGQAPRGLIGGTKFLAPGTPARFSGSLLGG |
| | | | | KAALTLSGVQPEDEAEYYCVLWYSNRWVFGGGTKLTVL |
| 1004. | PM07D3 HL X | artificial | nt | CAGGTGCAGCTGGTCGAGTCTGGCGGCGGACTGGTGAAGCCTGGCGAGTCCCTG |
| | I2C HL | | | AGGCTGTCCTGTGCCGCCTCCGGCTTCACCTTCTCCGACTACTACATGAGCTGGGT |
| | | | | CCGCCAGGCCCCTGGGAAGGGGCTGGAATGGGTGGCCTCCATCTCCGACGGCGG |
| | | | | CTCCAACACCTACTACTCCGACATCATCAAGGGCCGGTTCACCATCTCCCGAGACA |
| | | | | ACGCCAAGAACAGCCTGTACCTGCAGATGAACTCCCTGAAGGCCGAGGACACCGC |
| | | | | CGTGTACTACTGCGCCCGGGGCTTCCCTCTGCTGAGACACGGCGCCATCGATTACT |
| | | | | GGGGCCAGGGCACCCTGGTCACCGTCTCCTCAGGTGGTGGTGGTTCTGGCGGCG |
| | | | | GCGGCTCCGGTGGTGGTGGTTCTGACATCCAGATGACCCAGTCCCCCAGCTCCCT |
| | | | | GTCCGCCTCCGTGGGCGACAGAGTGACCATCACCTGCAGGGCCTCCCAGAACGTG |
| | | | | GACACCAACGTGGCCTGGTATCAGCAGAAGCCCGGCCAGGCCCCTAAGTCCCTGA |
| | | | | TCTACTCCGCCACCTACCGGTACTCTGACGTGCCTTCCCGGTTCTCCGGCTCCGCG |
| | | | | TCCGGCACCGACTTCACCCTGACCATCTCCAGCGTGCAGTCTGAGGACTTCGCCAC |
| | | | | GTACTACTGCCAGCAGTACAACTCCTACCCTTACACCTTCGGCGGAGGGACCAAGC |
| | | | | TGGAAATCAAGTCCGGAGGTGGTGGATCCGAGGTGCAGCTGGTCGAGTCTGGAGG |
| | | | | AGGATTGGTGCAGCCTGGAGGGTCATTGAAACTCTCATGTGCAGCCTCTGGATTCA |
| | | | | CCTTCAATAAGTACGCCATGAACTGGGTCCGCCAGGCTCCAGGAAAGGGTTTGGAA |
| | | | | TGGGTTGCTCGCATAAGAAGTAAATATAATAATTATGCAACATATTATGCCGATTCAG |
| | | | | TGAAAGACAGGTTCACCATCTCCAGAGATGATTCAAAAAACACTGCCTATCTACAAA |
| | | | | TGAACAACTTGAAAACTGAGGACACTGCCGTGTACTACTGTGTGAGACATGGGAAC |
| | | | | TTCGGTAATAGCTACATATCCTACTGGGCTTACTGGGGCCAAGGGACTCTGGTCAC |
| | | | | CGTCTCCTCAGGTGGTGGTGGTTCTGGCGGCGGCGGCTCCGGTGGTGGTGGTTCT |
| | | | | CAGACTGTTGTGACTCAGGAACCTTCACTCACCGTATCACCTGGTGGAACAGTCAC |
| | | | | ACTCACTTGTGGCTCCTCGACTGGGGCTGTTACATCTGGCAACTACCCAAACTGGG |
| | | | | TCCAACAAAAACCAGGTCAGGCACCCCGTGGTCTAATAGGTGGGACTAAGTTCCTC |
| | | | | GCCCCCGGTACTCCTGCCAGATTCTCAGGCTCCCTGCTTGGAGGCAAGGCTGCCC |
| | | | | TCACCCTCTCAGGGGTACAGCCAGAGGATGAGGCAGAATATTACTGTGTTCTATGG |
| | | | | TACAGCAACCGCTGGGTGTTCGGTGGAGGAACCAAACTGACTGTCCTA |
| 1005. | PM26C9-H | artificial | aa | QVQLVQSGPEVVKPGASVKVSCKASGYTFTGYVMHWVRQTPGQRLEWIGYINPYNDV |
| | | | | TRYNGKFKGRVTITSDKSSSTAYMELSSLRSEDTAVYYCARGENWYYFDSWGRGTLVT |
| | | | | VSS |
| 1006. | PM26C9-HCDR1 | artificial | aa | GYVMH |
| 1007. | PM26C9-HCDR2 | artificial | aa | YINPYNDVTRYNGKFKG |
| 1008. | PM26C9-HCDR3 | artificial | aa | GENWYYFDS |
| 1009. | PM26C9-H | artificial | nt | CAGGTGCAGCTGGTCCAGTCCGGCCCTGAGGTGGTGAAGCCTGGCGCCTCCGTGA |
| | | | | AGGTGTCCTGCAAGGCCTCCGGCTACACCTTCACCGGCTACGTGATGCACTGGGT |
| | | | | GAGACAGACACCCGGCCAGCGGCTGGAATGGATCGGCTACATCAACCCTTACAAC |
| | | | | GACGTGACCCGGTACAACGGCAAGTTCAAGGGCAGAGTCACCATTACCAGCGACA |
| | | | | AGTCCTCCTCCACCGCCTACATGGAACTGTCCAGCCTGAGGTCTGAGGACACCGC |
| | | | | CGTGTACTACTGCGCCAGGGGCGAGAACTGGTACTACTTCGACTCCTGGGGCAGA |
| | | | | GGCACTCTGGTCACCGTCTCCTCC |
| 1010. | PM26C9-L | artificial | aa | DVVMTQSPLSLAVTLGQPASISCRASESIDSYDNTFMHWYQQRPGQSPSLLIYRASILQ |
| | | | | SGVPDRFSGSGSGTDFTLKISRVEAEDVGVYYCHQSIEDPYTFGGGTKLEIK |
| 1011. | PM26C9-LCDR1 | artificial | aa | RASESIDSYDNTFMH |
| 1012. | PM26C9-LCDR2 | artificial | aa | RASILQS |
| 1013. | PM26C9-LCDR3 | artificial | aa | HQSIEDPYT |
| 1014. | PM26C9-L | artificial | nt | GACGTCGTGATGACCCAGTCTCCACTCTCCCTGGCTGTGACTCTGGGCCAGCCGG |
| | | | | CCTCCATCTCTTGCCGGGCCTCCGAGTCCATCGACTCCTACGACAACACCTTCATG |
| | | | | CACTGGTATCAGCAGAGGCCTGGCCAGTCTCCTAGCCTGCTGATCTACCGGGCCT |
| | | | | CTATCCTGCAATCCGGCGTCCCTGACCGGTTCTCCGGCTCTGGCTCCGGTACCGA |
| | | | | CTTCACCCTGAAAATCTCCCGTGTGGAGGCCGAGGACGTGGGCGTCTACTACTGC |
| | | | | CACCAGTCCATCGAGGACCCTTACACCTTCGGCGGAGGGACCAAGCTGGAAATCA |
| | | | | AG |
| 1015. | PM26C9-LH | artificial | aa | DVVMTQSPLSLAVTLGQPASISCRASESIDSYDNTFMHWYQQRPGQSPSLLIYRASILQ |
| | | | | SGVPDRFSGSGSGTDFTLKISRVEAEDVGVYYCHQSIEDPYTFGGGTKLEIKGGGGSG |
| | | | | GGGSGGGGSQVQLVQSGPEVVKPGASVKVSCKASGYTFTGYVMHWVRQTPGQRLE |
| | | | | WIGYINPYNDVTRYNGKFKGRVTITSDKSSSTAYMELSSLRSEDTAVYYCARGENWYYF |
| | | | | DSWGRGTLVTVSS |
| 1016. | PM26C9-LH | artificial | nt | GACGTCGTGATGACCCAGTCTCCACTCTCCCTGGCTGTGACTCTGGGCCAGCCGG |
| | | | | CCTCCATCTCTTGCCGGGCCTCCGAGTCCATCGACTCCTACGACAACACCTTCATG |
| | | | | CACTGGTATCAGCAGAGGCCTGGCCAGTCTCCTAGCCTGCTGATCTACCGGGCCT |
| | | | | CTATCCTGCAATCCGGCGTCCCTGACCGGTTCTCCGGCTCTGGCTCCGGTACCGA |
| | | | | CTTCACCCTGAAAATCTCCCGTGTGGAGGCCGAGGACGTGGGCGTCTACTACTGC |
| | | | | CACCAGTCCATCGAGGACCCTTACACCTTCGGCGGAGGGACCAAGCTGGAAATCA |
| | | | | AGGGTGGTGGTGGTTCTGGCGGCGGCGGCTCCGGTGGTGGTGGTTCTCAGGTGC |
| | | | | AGCTGGTCCAGTCCGGCCCTGAGGTGGTGAAGCCTGGCGCCTCCGTGAAGGTGTC |
| | | | | CTGCAAGGCCTCCGGCTACACCTTCACCGGCTACGTGATGCACTGGGTGAGACAG |
| | | | | ACACCCGGCCAGCGGCTGGAATGGATCGGCTACATCAACCCTTACAACGACGTGA |
| | | | | CCCGGTACAACGGCAAGTTCAAGGGCAGAGTCACCATTACCAGCGACAAGTCCTCC |
| | | | | TCCACCGCCTACATGGAACTGTCCAGCCTGAGGTCTGAGGACACCGCCGTGTACTA |
| | | | | CTGCGCCAGGGGCGAGAACTGGTACTACTTCGACTCCTGGGGCAGAGGCACTCTG |
| | | | | GTCACCGTCTCCTCC |
| 1017. | PM26C9 LH X | artificial | aa | DVVMTQSPLSLAVTLGQPASISCRASESIDSYDNTFMHWYQQRPGQSPSLLIYRASILQ |
| | I2C HL | | | SGVPDRFSGSGSGTDFTLKISRVEAEDVGVYYCHQSIEDPYTFGGGTKLEIKGGGGSG |
| | | | | GGGSGGGGSQVQLVQSGPEVVKPGASVKVSCKASGYTFTGYVMHWVRQTPGQRLE |
| | | | | WIGYINPYNDVTRYNGKFKGRVTITSDKSSSTAYMELSSLRSEDTAVYYCARGENWYYF |
| | | | | DSWGRGTLVTVSSGGGGSEVQLVESGGGLVQPGGSLKLSCAASGFTFNKYAMNWVR |
| | | | | QAPGKGLEWVARIRSKYNNYATYYADSVKDRFTISRDDSKNTAYLQMNNLKTEDTAVY |
| | | | | YCVRHGNFGNSYISYWAYWGQGTLVTVSSGGGGSGGGGSGGGGSQTVVTQEPSLTV |
| | | | | SPGGTVTLTCGSSTGAVTSGNYPNWVQQKPGQAPRGLIGGTKFLAPGTPARFSGSLL |
| | | | | GGKAALTLSGVQPEDEAEYYCVLWYSNRWVFGGGTKLTVL |
| 1018. | PM26C9 LH X | artificial | nt | GACGTCGTGATGACCCAGTCTCCACTCTCCCTGGCTGTGACTCTGGGCCAGCCGG |
| | I2C HL | | | CCTCCATCTCTTGCCGGGCCTCCGAGTCCATCGACTCCTACGACAACACCTTCATG |
| | | | | CACTGGTATCAGCAGAGGCCTGGCCAGTCTCCTAGCCTGCTGATCTACCGGGCCT |
| | | | | CTATCCTGCAATCCGGCGTCCCTGACCGGTTCTCCGGCTCTGGCTCCGGTACCGA |
| | | | | CTTCACCCTGAAAATCTCCCGTGTGGAGGCCGAGGACGTGGGCGTCTACTACTGC |
| | | | | CACCAGTCCATCGAGGACCCTTACACCTTCGGCGGAGGGACCAAGCTGGAAATCA |
| | | | | AGGGTGGTGGTGGTTCTGGCGGCGGCGGCTCCGGTGGTGGTGGTTCTCAGGTGC |
| | | | | AGCTGGTCCAGTCCGGCCCTGAGGTGGTGAAGCCTGGCGCCTCCGTGAAGGTGTC |
| | | | | CTGCAAGGCCTCCGGCTACACCTTCACCGGCTACGTGATGCACTGGGTGAGACAG |
| | | | | ACACCCGGCCAGCGGCTGGAATGGATCGGCTACATCAACCCTTACAACGACGTGA |
| | | | | CCCGGTACAACGGCAAGTTCAAGGGCAGAGTCACCATTACCAGCGACAAGTCCTCC |
| | | | | TCCACCGCCTACATGGAACTGTCCAGCCTGAGGTCTGAGGACACCGCCGTGTACTA |
| | | | | CTGCGCCAGGGGCGAGAACTGGTACTACTTCGACTCCTGGGGCAGAGGCACTCTG |
| | | | | GTCACCGTCTCCTCCGGAGGTGGTGGATCCGAGGTGCAGCTGGTCGAGTCTGGAG |
| | | | | GAGGATTGGTGCAGCCTGGAGGGTCATTGAAACTCTCATGTGCAGCCTCTGGATTC |
| | | | | ACCTTCAATAAGTACGCCATGAACTGGGTCCGCCAGGCTCCAGGAAAGGGTTTGGA |
| | | | | ATGGGTTGCTCGCATAAGAAGTAAATATAATAATTATGCAACATATTATGCCGATTCA |
| | | | | GTGAAAGACAGGTTCACCATCTCCAGAGATGATTCAAAAAACACTGCCTATCTACAA |
| | | | | ATGAACAACTTGAAAACTGAGGACACTGCCGTGTACTACTGTGTGAGACATGGGAA |
| | | | | CTTCGGTAATAGCTACATATCCTACTGGGCTTACTGGGGCCAAGGGACTCTGGTCA |
| | | | | CCGTCTCCTCAGGTGGTGGTGGTTCTGGCGGCGGCGGCTCCGGTGGTGGTGGTTC |
| | | | | TCAGACTGTTGTGACTCAGGAACCTTCACTCACCGTATCACCTGGTGGAACAGTCA |
| | | | | CACTCACTTGTGGCTCCTCGACTGGGGCTGTTACATCTGGCAACTACCCAAACTGG |
| | | | | GTCCAACAAAAACCAGGTCAGGCACCCCGTGGTCTAATAGGTGGGACTAAGTTCCT |
| | | | | CGCCCCCGGTACTCCTGCCAGATTCTCAGGCTCCCTGCTTGGAGGCAAGGCTGCC |
| | | | | CTCACCCTCTCAGGGGTACAGCCAGAGGATGAGGCAGAATATTACTGTGTTCTATG |
| | | | | GTACAGCAACCGCTGGGTGTTCGGTGGAGGAACCAAACTGACTGTCCTA |
| 1019. | PM26H4-H | artificial | aa | QVQLVQSGPEVVKPGASVKVSCKASGYTFTGYVLHWVKQTPGQRLEWIGYINPYNDVT |
| | | | | RYNGKFKGRVTITSDTSASTAYMELSGLTSEDTAVYYCARGENWYYFDSWGRGTLVTV |
| | | | | SS |
| 1020. | PM26H4-HCDR1 | artificial | aa | GYVLH |
| 1021. | PM26H4-HCDR2 | artificial | aa | YINPYNDVTRYNGKFKG |
| 1022. | PM26H4-HCDR3 | artificial | aa | GENWYYFDS |
| 1023. | PM26H4-H | artificial | nt | CAGGTGCAGCTGGTCCAGTCCGGCCCTGAGGTGGTGAAGCCTGGCGCCTCCGTGA |
| | | | | AGGTGTCCTGCAAGGCCTCCGGCTACACCTTCACCGGCTACGTGCTGCACTGGGT |
| | | | | GAAACAGACACCCGGCCAGCGGCTGGAATGGATCGGCTACATCAACCCTTACAAC |
| | | | | GACGTGACCCGGTACAACGGCAAGTTCAAGGGCAGAGTCACCATTACCAGCGACA |
| | | | | CGTCCGCCTCCACCGCCTACATGGAACTGTCCGGCCTGACGTCTGAGGACACCGC |
| | | | | CGTGTATTACTGCGCCAGGGGCGAGAACTGGTACTACTTCGACTCCTGGGGCAGA |
| | | | | GGCACTCTGGTCACCGTCTCCTCC |
| 1024. | PM26H4-L | artificial | aa | DVVMTQSPLSLAVTLGQRASISCRASESIDSYGNTFMHWYQQRPGQSPRLLIYRASILE |
| | | | | SGVPARFSGSGSGTDFTLAISRVEAEDVGVYYCHQSIEDPYTFGGGTKLEIK |
| 1025. | PM26H4-LCDR1 | artificial | aa | RASESIDSYGNTFMH |
| 1026. | PM26H4-LCDR2 | artificial | aa | RASILES |
| 1027. | PM26H4-LCDR3 | artificial | aa | HQSIEDPYT |
| 1028. | PM26H4-L | artificial | nt | GACGTCGTGATGACCCAGTCTCCACTCTCCCTGGCTGTGACTCTGGGCCAGCGGG |
| | | | | CCTCCATCTCTTGCCGGGCCTCCGAGTCCATCGACTCCTACGGCAACACCTTCATG |
| | | | | CACTGGTATCAGCAGAGGCCTGGCCAGTCTCCTCGCCTGCTGATCTACCGGGCCT |
| | | | | CTATCCTGGAATCCGGCGTCCCTGCCCGGTTCTCCGGCTCTGGCTCCGGCACCGA |
| | | | | CTTCACCCTGGCAATCTCCCGTGTGGAGGCCGAGGACGTGGGCGTCTACTACTGC |
| | | | | CACCAGTCCATCGAGGACCCTTACACCTTCGGCGGAGGGACCAAGCTGGAAATCA |
| | | | | AG |
| 1029. | PM26H4-LH | artificial | aa | DVVMTQSPLSLAVTLGQRASISCRASESIDSYGNTFMHWYQQRPGQSPRLLIYRASILE |
| | | | | SGVPARFSGSGSGTDFTLAISRVEAEDVGVYYCHQSIEDPYTFGGGTKLEIKGGGGSG |
| | | | | GGGSGGGGSQVQLVQSGPEVVKPGASVKVSCKASGYTFTGYVLHWVKQTPGQRLEW |
| | | | | IGYINPYNDVTRYNGKFKGRVTITSDTSASTAYMELSGLTSEDTAVYYCARGENWYYFD |
| | | | | SWGRGTLVTVSS |
| 1030. | PM26H4-LH | artificial | nt | GACGTCGTGATGACCCAGTCTCCACTCTCCCTGGCTGTGACTCTGGGCCAGCGGG |
| | | | | CCTCCATCTCTTGCCGGGCCTCCGAGTCCATCGACTCCTACGGCAACACCTTCATG |
| | | | | CACTGGTATCAGCAGAGGCCTGGCCAGTCTCCTCGCCTGCTGATCTACCGGGCCT |
| | | | | CTATCCTGGAATCCGGCGTCCCTGCCCGGTTCTCCGGCTCTGGCTCCGGCACCGA |
| | | | | CTTCACCCTGGCAATCTCCCGTGTGGAGGCCGAGGACGTGGGCGTCTACTACTGC |
| | | | | CACCAGTCCATCGAGGACCCTTACACCTTCGGCGGAGGGACCAAGCTGGAAATCA |
| | | | | AGGGTGGTGGTGGTTCTGGCGGCGGCGGCTCCGGTGGTGGTGGTTCTCAGGTGC |
| | | | | AGCTGGTCCAGTCCGGCCCTGAGGTGGTGAAGCCTGGCGCCTCCGTGAAGGTGTC |
| | | | | CTGCAAGGCCTCCGGCTACACCTTCACCGGCTACGTGCTGCACTGGGTGAAACAG |
| | | | | ACACCCGGCCAGCGGCTGGAATGGATCGGCTACATCAACCCTTACAACGACGTGA |
| | | | | CCCGGTACAACGGCAAGTTCAAGGGCAGAGTCACCATTACCAGCGACACGTCCGC |
| | | | | CTCCACCGCCTACATGGAACTGTCCGGCCTGACGTCTGAGGACACCGCCGTGTATT |
| | | | | ACTGCGCCAGGGGCGAGAACTGGTACTACTTCGACTCCTGGGGCAGAGGCACTCT |
| | | | | GGTCACCGTCTCCTCC |
| 1031. | PM26H4 LH X | artificial | aa | DVVMTQSPLSLAVTLGQRASISCRASESIDSYGNTFMHWYQQRPGQSPRLLIYRASILE |
| | I2C HL | | | SGVPARFSGSGSGTDFTLAISRVEAEDVGVYYCHQSIEDPYTFGGGTKLEIKGGGGSG |
| | | | | GGGSGGGGSQVQLVQSGPEVVKPGASVKVSCKASGYTFTGYVLHWVKQTPGQRLEW |
| | | | | IGYINPYNDVTRYNGKFKGRVTITSDTSASTAYMELSGLTSEDTAVYYCARGENWYYFD |
| | | | | SWGRGTLVTVSSSGGGGSEVQLVESGGGLVQPGGSLKLSCAASGFTFNKYAMNWVR |
| | | | | QAPGKGLEWVARIRSKYNNYATYYADSVKDRFTISRDDSKNTAYLQMNNLKTEDTAVY |
| | | | | YCVRHGNFGNSYISYWAYWGQGTLVTVSSGGGGSGGGGSGGGGSQTVVTQEPSLTV |
| | | | | SPGGTVTLTCGSSTGAVTSGNYPNWVQQKPGQAPRGLIGGTKFLAPGTPARFSGSLL |
| | | | | GGKAALTLSGVQPEDEAEYYCVLWYSNRWVFGGGTKLTVL |
| 1032. | PM26H4 LH X | artificial | nt | GACGTCGTGATGACCCAGTCTCCACTCTCCCTGGCTGTGACTCTGGGCCAGCGGG |
| | I2C HL | | | CCTCCATCTCTTGCCGGGCCTCCGAGTCCATCGACTCCTACGGCAACACCTTCATG |
| | | | | CACTGGTATCAGCAGAGGCCTGGCCAGTCTCCTCGCCTGCTGATCTACCGGGCCT |
| | | | | CTATCCTGGAATCCGGCGTCCCTGCCCGGTTCTCCGGCTCTGGCTCCGGCACCGA |
| | | | | CTTCACCCTGGCAATCTCCCGTGTGGAGGCCGAGGACGTGGGCGTCTACTACTGC |
| | | | | CACCAGTCCATCGAGGACCCTTACACCTTCGGCGGAGGGACCAAGCTGGAAATCA |
| | | | | AGGGTGGTGGTGGTTCTGGCGGCGGCGGCTCCGGTGGTGGTGGTTCTCAGGTGC |
| | | | | AGCTGGTCCAGTCCGGCCCTGAGGTGGTGAAGCCTGGCGCCTCCGTGAAGGTGTC |
| | | | | CTGCAAGGCCTCCGGCTACACCTTCACCGGCTACGTGCTGCACTGGGTGAAACAG |
| | | | | ACACCCGGCCAGCGGCTGGAATGGATCGGCTACATCAACCCTTACAACGACGTGA |
| | | | | CCCGGTACAACGGCAAGTTCAAGGGCAGAGTCACCATTACCAGCGACACGTCCGC |
| | | | | CTCCACCGCCTACATGGAACTGTCCGGCCTGACGTCTGAGGACACCGCCGTGTATT |
| | | | | ACTGCGCCAGGGGCGAGAACTGGTACTACTTCGACTCCTGGGGCAGAGGCACTCT |
| | | | | GGTCACCGTCTCCTCCGGAGGTGGTGGATCCGAGGTGCAGCTGGTCGAGTCTGGA |
| | | | | GGAGGATTGGTGCAGCCTGGAGGGTCATTGAAACTCTCATGTGCAGCCTCTGGATT |
| | | | | CACCTTCAATAAGTACGCCATGAACTGGGTCCGCCAGGCTCCAGGAAAGGGTTTGG |
| | | | | AATGGGTTGCTCGCATAAGAAGTAAATATAATAATTATGCAACATATTATGCCGATTC |
| | | | | AGTGAAAGACAGGTTCACCATCTCCAGAGATGATTCAAAAAACACTGCCTATCTACA |
| | | | | AATGAACAACTTGAAAACTGAGGACACTGCCGTGTACTACTGTGTGAGACATGGGA |
| | | | | ACTTCGGTAATAGCTACATATCCTACTGGGCTTACTGGGGCCAAGGGACTCTGGTC |
| | | | | ACCGTCTCCTCAGGTGGTGGTGGTTCTGGCGGCGGCGGCTCCGGTGGTGGTGGTT |
| | | | | CTCAGACTGTTGTGACTCAGGAACCTTCACTCACCGTATCACCTGGTGGAACAGTC |
| | | | | ACACTCACTTGTGGCTCCTCGACTGGGGCTGTTACATCTGGCAACTACCCAAACTG |
| | | | | GGTCCAACAAAAACCAGGTCAGGCACCCCGTGGTCTAATAGGTGGGACTAAGTTCC |
| | | | | TCGCCCCCGGTACTCCTGCCAGATTCTCAGGCTCCCTGCTTGGAGGCAAGGCTGC |
| | | | | CCTCACCCTCTCAGGGGTACAGCCAGAGGATGAGGCAGAATATTACTGTGTTCTAT |
| | | | | GGTACAGCAACCGCTGGGTGTTCGGTGGAGGAACCAAACTGACTGTCCTA |
| 1033. | huPSMArat140- | artificial | nt | ATGTGGAATCTGCTTCACGAAACAGACTCGGCTGTCGCCACCGCGCGGCGCCCGC |
| | 169 | | | GGTGGCTGTGCGCCGGGGCGCTGGTCCTGGCGGGTGGATTCTTTCTCCTGGGCTT |
| | | | | CCTCTTTGGGTGGTTTATCAAATCCTCCAACGAAGCTACTAATATTACTCCAAAACAT |
| | | | | AATATGAAGGCATTTTTGGACGAATTGAAAGCCGAGAACATCAAAAAGTTCTTATAC |
| | | | | AATTTTACCCAGATACCACACTTAGCAGGAACCGAACAAAACTTCCAGCTTGCAAAA |
| | | | | CAAATTCAATCTCAGTGGAAAGAGTTTGGCCTGGACTCTGTTGAGCTGGCACATTAT |
| | | | | GACGTCCTGTTGTCTTACCCAAATAAAACTCATCCCAATTACATCTCAATCATTAATG |
| | | | | AAGACGGAAATGAGATCTTCAAAACATCATTAGCTGAACTGTCACCCCCGGGATATG |
| | | | | AGAACATATCAGATGTAGTGCCACCATACAGTGCCTTCTCTCCACAAGGGACACCC |
| | | | | GAGGGGGACCTAGTGTATGTGAACTATGCACGGACTGAAGACTTTTTTAAATTGGA |
| | | | | GCGGGACATGAAGATCAATTGCTCCGGGAAAATTGTGATTGCCAGATACGGGAAAG |
| | | | | TTTTTAGAGGAAATAAAGTTAAAAATGCTCAGCTGGCAGGCGCCAAAGGAGTGATTC |
| | | | | TCTACTCTGACCCTGCTGATTACTTTGCTCCCGGGGTGAAGTCATATCCAGATGGCT |
| | | | | GGAATCTTCCCGGAGGTGGTGTGCAGCGTGGAAACATCCTAAATCTCAATGGTGCA |
| | | | | GGCGACCCTCTCACCCCAGGTTACCCCGCAAATGAATACGCTTATAGGCGGGGAAT |
| | | | | TGCAGAAGCTGTTGGTCTGCCAAGTATTCCAGTTCATCCAATCGGATACTATGACGC |
| | | | | ACAGAAGCTGCTAGAAAAGATGGGTGGCTCCGCACCACCAGACAGCAGCTGGAGG |
| | | | | GGAAGTCTCAAGGTGCCCTACAACGTTGGACCTGGATTTACTGGAAATTTTTCTACA |
| | | | | CAGAAAGTCAAAATGCACATCCATTCTACCAATGAGGTGACAAGAATCTACAATGTG |
| | | | | ATCGGTACTCTCAGGGGAGCAGTGGAGCCAGACAGGTATGTCATTCTCGGAGGTC |
| | | | | ACCGCGACTCATGGGTCTTTGGTGGTATCGACCCTCAGAGCGGAGCAGCTGTGGT |
| | | | | TCATGAAATCGTGAGGAGCTTCGGAACACTGAAGAAGGAAGGCTGGAGACCTAGG |
| | | | | AGAACAATCTTGTTTGCAAGTTGGGATGCAGAGGAATTTGGTCTGCTTGGTTCTACC |
| | | | | GAGTGGGCAGAAGAGAACTCAAGACTCCTGCAAGAGCGTGGAGTGGCTTATATCAA |
| | | | | TGCTGACTCCTCTATAGAAGGCAACTACACCCTGAGAGTTGACTGTACACCCCTGAT |
| | | | | GTACAGTTTGGTACACAATCTAACAAAAGAACTGAAAAGCCCCGATGAAGGCTTCGA |
| | | | | AGGCAAATCCCTTTATGAAAGCTGGACTAAAAAGAGTCCTTCCCCTGAGTTCAGTGG |
| | | | | AATGCCCAGGATCAGCAAATTGGGCTCTGGAAATGACTTTGAGGTGTTTTTCCAACG |
| | | | | ACTGGGAATTGCTTCCGGCAGAGCACGCTATACTAAAAACTGGGAAACAAATAAATT |
| | | | | CAGTGGCTATCCCCTGTATCACAGCGTCTATGAAACCTATGAGTTGGTCGAAAAGTT |
| | | | | TTACGATCCAATGTTCAAATATCACCTGACTGTGGCTCAGGTTCGAGGCGGGATGG |
| | | | | TGTTCGAGCTAGCCAACTCCATAGTGCTGCCTTTTGATTGCCGAGATTATGCCGTAG |
| | | | | TTTTAAGGAAGTATGCTGATAAAATCTACAGCATTTCTATGAAGCATCCACAGGAGA |
| | | | | TGAAGACATATAGTGTATCATTCGATTCACTTTTCTCTGCAGTGAAGAATTTTACCGA |
| | | | | AATTGCTTCTAAGTTTAGTGAGAGGCTCCAGGACTTCGACAAAAGCAATCCAATAGT |
| | | | | ATTGAGAATGATGAACGATCAACTGATGTTTCTGGAGAGAGCATTTATCGATCCATT |
| | | | | AGGCTTACCAGACCGCCCTTTTTATAGACATGTCATCTACGCTCCAAGCAGTCACAA |
| | | | | CAAGTACGCAGGGGAGTCCTTCCCAGGAATCTATGATGCCCTGTTTGACATTGAAA |
| | | | | GCAAGGTGGACCCTTCTAAGGCCTGGGGCGAAGTGAAGAGGCAGATTTATGTGGC |
| | | | | AGCCTTCACCGTGCAGGCAGCCGCAGAGACCTTGAGTGAGGTAGCCTCCGGGGAT |
| | | | | TACAAGGACGACGATGACAAGTAA |
| 1034. | huPSMArat140- | artificial | aa | MWNLLHETDSAVATARRPRWLCAGALVLAGGFFLLGFLFGWFIKSSNEATNITPKHNM |
| | 169 | | | KAFLDELKAENIKKFLYNFTQIPHLAGTEQNFQLAKQIQSQWKEFGLDSVELAHYDVLLS |
| | | | | YPNKTHPNYISIINEDGNEIFKTSLAELSPPGYENISDVVPPYSAFSPQGTPEGDLVYVNY |
| | | | | ARTEDFFKLERDMKINCSGKIVIARYGKVFRGNKVKNAQLAGAKGVILYSDPADYFAPG |
| | | | | VKSYPDGWNLPGGGVQRGNILNLNGAGDPLTPGYPANEYAYRRGIAEAVGLPSIPVHPI |
| | | | | GYYDAQKLLEKMGGSAPPDSSWRGSLKVPYNVGPGFTGNFSTQKVKMHIHSTNEVTRI |
| | | | | YNVIGTLRGAVEPDRYVILGGHRDSWVFGGIDPQSGAAVVHEIVRSFGTLKKEGWRPR |
| | | | | RTILFASWDAEEFGLLGSTEWAEENSRLLQERGVAYINADSSIEGNYTLRVDCTPLMYS |
| | | | | LVHNLTKELKSPDEGFEGKSLYESWTKKSPSPEFSGMPRISKLGSGNDFEVFFQRLGIA |
| | | | | SGRARYTKNWETNKFSGYPLYHSVYETYELVEKFYDPMFKYHLTVAQVRGGMVFELA |
| | | | | NSIVLPFDCRDYAVVLRKYADKIYSISMKHPQEMKTYSVSFDSLFSAVKNFTEIASKFSE |
| | | | | RLQDFDKSNPIVLRMMNDQLMFLERAFIDPLGLPDRPFYRHVIYAPSSHNKYAGESFPGI |
| | | | | YDALFDIESKVDPSKAWGEVKRQIYVAAFTVQAAAETLSEVASGDYKDDDDK |
| 1035. | huPSMArat191- | artificial | nt | ATGTGGAATCTGCTTCACGAAACAGACTCGGCTGTCGCCACCGCGCGGCGCCCGC |
| | 258 | | | GGTGGCTGTGCGCCGGGGCGCTGGTCCTGGCGGGTGGATTCTTTCTCCTGGGCTT |
| | | | | CCTCTTTGGGTGGTTTATCAAATCCTCCAACGAAGCTACTAATATTACTCCAAAACAT |
| | | | | AATATGAAGGCATTTTTGGACGAATTGAAAGCCGAGAACATCAAAAAGTTCTTATAC |
| | | | | AATTTTACCCAGATACCACACTTAGCAGGAACCGAACAAAACTTCCAGCTTGCAAAA |
| | | | | CAAATTCAATCTCAGTGGAAAGAGTTTGGCCTGGACTCTGTTGAGCTGGCACATTAT |
| | | | | GACGTCCTGTTGTCTTACCCAAATAAAACTCATCCCAATTACATCTCAATCATTAATG |
| | | | | AAGACGGAAATGAGATCTTCAACACATCCTTATTTGAACCCCCTCCTCCAGGCTATG |
| | | | | AAAATGTGTCGGATATTGTGCCACCTTTCAGCGCTTTCTCTCCCCAAGGAATGCCCG |
| | | | | AGGGCGACCTAGTGTATGTGAACTATGCGCGCACTGAAGACTTTTTTAAATTGGAG |
| | | | | CGGGTCATGAAGATCAATTGTTCTGGGAAGATTGTCATCGCCAGATATGGCCAAGT |
| | | | | GTTCAGAGGAAACAAGGTTAAAAACGCTCAGCTGGCAGGTGCAAAAGGAATCATTC |
| | | | | TGTACTCAGACCCTGCTGATTACTTTGTTCCTGGCGTGAAGTCCTACCCAGATGGCT |
| | | | | GGAACCTCCCTGGAGGTGGCGTTCAGCGTGGAAACGTCCTAAATCTCAATGGTGCA |
| | | | | GGCGACCCGTTAACCCCAGGTTACCCCGCAAATGAATACGCTTATAGGCGGGGAAT |
| | | | | TGCAGAAGCTGTTGGTCTGCCAAGTATTCCAGTTCATCCAATCGGATACTATGACGC |
| | | | | ACAGAAGCTGCTAGAAAAGATGGGTGGCTCCGCACCACCAGACAGCAGCTGGAGG |
| | | | | GGAAGCTTGAAGGTGCCCTACAACGTTGGACCTGGATTTACTGGAAATTTTTCTACA |
| | | | | CAGAAAGTCAAAATGCACATCCATTCTACCAATGAGGTGACAAGAATCTACAATGTG |
| | | | | ATCGGTACTCTCAGGGGAGCAGTGGAGCCAGACAGGTATGTCATTCTCGGAGGTC |
| | | | | ACCGCGACTCATGGGTCTTTGGTGGTATCGACCCTCAGAGCGGAGCAGCTGTGGT |
| | | | | TCATGAAATCGTGAGGAGCTTCGGAACACTGAAGAAGGAAGGCTGGAGACCTAGG |
| | | | | AGAACAATCTTGTTTGCAAGTTGGGATGCAGAGGAATTTGGTCTGCTTGGTTCTACC |
| | | | | GAGTGGGCAGAAGAGAACTCAAGACTCCTGCAAGAGCGTGGAGTGGCTTATATCAA |
| | | | | TGCTGACTCCTCTATAGAAGGCAACTACACCCTGAGAGTTGACTGTACACCCCTGAT |
| | | | | GTACAGTTTGGTACACAATCTAACAAAAGAACTGAAAAGCCCCGATGAAGGCTTCGA |
| | | | | AGGCAAATCCCTTTATGAAAGCTGGACTAAAAAGAGTCCTTCCCCTGAGTTCAGTGG |
| | | | | AATGCCCAGGATCAGCAAATTGGGCTCTGGAAATGACTTTGAGGTGTTTTTCCAACG |
| | | | | ACTGGGAATTGCTTCCGGCAGAGCACGCTATACTAAAAACTGGGAAACAAATAAATT |
| | | | | CAGTGGCTATCCCCTGTATCACAGCGTCTATGAAACCTATGAGTTGGTCGAAAAGTT |
| | | | | TTACGATCCAATGTTCAAATATCACCTGACTGTGGCTCAGGTTCGAGGCGGGATGG |
| | | | | TGTTCGAGCTAGCCAACTCCATAGTGCTGCCTTTTGATTGCCGAGATTATGCCGTAG |
| | | | | TTTTAAGGAAGTATGCTGATAAAATCTACAGCATTTCTATGAAGCATCCACAGGAGA |
| | | | | TGAAGACATATAGTGTATCATTCGATTCACTTTTCTCTGCAGTGAAGAATTTTACCGA |
| | | | | AATTGCTTCTAAGTTTAGTGAGAGGCTCCAGGACTTCGACAAAAGCAATCCAATAGT |
| | | | | ATTGAGAATGATGAACGATCAACTGATGTTTCTGGAGAGAGCATTTATCGATCCATT |
| | | | | AGGCTTACCAGACCGCCCTTTTTATAGACATGTCATCTACGCTCCAAGCAGTCACAA |
| | | | | CAAGTACGCAGGGGAGTCCTTCCCAGGAATCTATGATGCCCTGTTTGACATTGAAA |
| | | | | GCAAGGTGGACCCTTCTAAGGCCTGGGGCGAAGTGAAGAGGCAGATTTATGTGGC |
| | | | | AGCCTTCACCGTGCAGGCAGCCGCAGAGACCTTGAGTGAGGTAGCCTCCGGGGAT |
| | | | | TACAAGGACGACGATGACAAGTAA |
| 1036. | huPSMArat191- | artificial | aa | MWNLLHETDSAVATARRPRWLCAGALVLAGGFFLLGFLFGWFIKSSNEATNITPKHNM |
| | 258 | | | KAFLDELKAENIKKFLYNFTQIPHLAGTEQNFQLAKQIQSQWKEFGLDSVELAHYDVLLS |
| | | | | YPNKTHPNYISIINEDGNEIFNTSLFEPPPPGYENVSDIVPPFSAFSPQGMPEGDLVYVN |
| | | | | YARTEDFFKLERVMKINCSGKIVIARYGQVFRGNKVKNAQLAGAKGIILYSDPADYFVPG |
| | | | | VKSYPDGWNLPGGGVQRGNVLNLNGAGDPLTPGYPANEYAYRRGIAEAVGLPSIPVHP |
| | | | | IGYYDAQKLLEKMGGSAPPDSSWRGSLKVPYNVGPGFTGNFSTQKVKMHIHSTNEVTR |
| | | | | IYNVIGTLRGAVEPDRYVILGGHRDSWVFGGIDPQSGAAVVHEIVRSFGTLKKEGWRPR |
| | | | | RTILFASWDAEEFGLLGSTEWAEENSRLLQERGVAYINADSSIEGNYTLRVDCTPLMYS |
| | | | | LVHNLTKELKSPDEGFEGKSLYESWTKKSPSPEFSGMPRISKLGSGNDFEVFFQRLGIA |
| | | | | SGRARYTKNWETNKFSGYPLYHSVYETYELVEKFYDPMFKYHLTVAQVRGGMVFELA |
| | | | | NSIVLPFDCRDYAVVLRKYADKIYSISMKHPQEMKTYSVSFDSLFSAVKNFTEIASKFSE |
| | | | | RLQDFDKSNPIVLRMMNDQLMFLERAFIDPLGLPDRPFYRHVIYAPSSHNKYAGESFPGI |
| | | | | YDALFDIESKVDPSKAWGEVKRQIYVAAFTVQAAAETLSEVASGDYKDDDDK |
| 1037. | huPSMArat281- | artificial | nt | ATGTGGAATCTGCTTCACGAAACAGACTCGGCTGTCGCCACCGCGCGGCGCCCGC |
| | 284 | | | GGTGGCTGTGCGCCGGGGCGCTGGTCCTGGCGGGTGGATTCTTTCTCCTGGGCTT |
| | | | | CCTCTTTGGGTGGTTTATCAAATCCTCCAACGAAGCTACTAATATTACTCCAAAACAT |
| | | | | AATATGAAGGCATTTTTGGACGAATTGAAAGCCGAGAACATCAAAAAGTTCTTATAC |
| | | | | AATTTTACCCAGATACCACACTTAGCAGGAACCGAACAAAACTTCCAGCTTGCAAAA |
| | | | | CAAATTCAATCTCAGTGGAAAGAGTTTGGCCTGGACTCTGTTGAGCTGGCACATTAT |
| | | | | GACGTCCTGTTGTCTTACCCAAATAAAACTCATCCCAATTACATCTCAATCATTAATG |
| | | | | AAGACGGAAATGAGATCTTCAACACATCCTTATTTGAACCCCCTCCTCCAGGCTATG |
| | | | | AAAATGTGTCGGATATTGTGCCACCTTTCAGCGCTTTCTCTCCCCAAGGAATGCCCG |
| | | | | AGGGCGACCTAGTGTATGTGAACTATGCACGGACTGAAGACTTTTTTAAATTGGAGC |
| | | | | GGGACATGAAGATCAATTGCTCCGGGAAAATTGTGATTGCCAGATACGGGAAAGTT |
| | | | | TTTAGAGGAAATAAAGTTAAAAATGCTCAGCTGGCAGGCGCCAAAGGAGTGATTCT |
| | | | | CTACTCTGACCCTGCTGATTACTTTGCTCCCGGGGTGAAGTCATATCCAGATGGCT |
| | | | | GGAATCTTCCCGGAGGTGGTGTGCAGCGTGGAAACATCCTAAATCTCAATGGTGCA |
| | | | | GGCGACCCGTTAACCCCAGGTTACCCCGCAAATGAATACGCTTATAGGCATGAGTT |
| | | | | CACAGAAGCTGTTGGTCTGCCAAGTATTCCAGTTCATCCAATCGGATACTATGACGC |
| | | | | ACAGAAGCTGCTAGAAAAGATGGGTGGCTCCGCACCACCAGACAGCAGCTGGAGG |
| | | | | GGAAGCTTGAAGGTGCCCTACAACGTTGGACCTGGATTTACTGGAAATTTTTCTACA |
| | | | | CAGAAAGTCAAAATGCACATCCATTCTACCAATGAGGTGACAAGAATCTACAATGTG |
| | | | | ATCGGTACTCTCAGGGGAGCAGTGGAGCCAGACCGGTATGTCATTCTCGGAGGTC |
| | | | | ACCGCGACTCATGGGTCTTTGGTGGTATCGACCCTCAGAGCGGAGCAGCTGTGGT |
| | | | | TCATGAAATCGTGAGGAGCTTCGGAACACTGAAGAAGGAAGGCTGGAGACCTAGG |
| | | | | AGAACAATCTTGTTTGCAAGTTGGGATGCAGAGGAATTTGGTCTGCTTGGTTCTACC |
| | | | | GAGTGGGCAGAAGAGAACTCAAGACTCCTGCAAGAGCGTGGAGTGGCTTATATCAA |
| | | | | TGCTGACTCCTCTATAGAAGGCAACTACACCCTGAGAGTTGACTGTACACCCCTGAT |
| | | | | GTACAGTTTGGTACACAATCTAACAAAAGAACTGAAAAGCCCCGATGAAGGCTTCGA |
| | | | | AGGCAAATCCCTTTATGAAAGCTGGACTAAAAAGAGTCCTTCCCCTGAGTTCAGTGG |
| | | | | AATGCCCAGGATCAGCAAATTGGGCTCTGGAAATGACTTTGAGGTGTTTTTCCAACG |
| | | | | ACTGGGAATTGCTTCCGGCAGAGCACGCTATACTAAAAACTGGGAAACAAATAAATT |
| | | | | CAGTGGCTATCCCCTGTATCACAGCGTCTATGAAACCTATGAGTTGGTCGAAAAGTT |
| | | | | TTACGATCCAATGTTCAAATATCACCTGACTGTGGCTCAGGTTCGAGGCGGGATGG |
| | | | | TGTTCGAGCTAGCCAACTCCATAGTGCTGCCTTTTGATTGCCGAGATTATGCCGTAG |
| | | | | TTTTAAGGAAGTATGCTGATAAAATCTACAGCATTTCTATGAAGCATCCACAGGAGA |
| | | | | TGAAGACATATAGTGTATCATTCGATTCACTTTTCTCTGCAGTGAAGAATTTTACCGA |
| | | | | AATTGCTTCTAAGTTTAGTGAGAGGCTCCAGGACTTCGACAAAAGCAATCCAATAGT |
| | | | | ATTGAGAATGATGAACGATCAACTGATGTTTCTGGAGAGAGCATTTATCGATCCATT |
| | | | | AGGCTTACCAGACCGCCCTTTTTATAGACATGTCATCTACGCTCCAAGCAGTCACAA |
| | | | | CAAGTACGCAGGGGAGTCCTTCCCAGGAATCTATGATGCCCTGTTTGACATTGAAA |
| | | | | GCAAGGTGGACCCTTCTAAGGCCTGGGGCGAAGTGAAGAGGCAGATTTATGTGGC |
| | | | | AGCCTTCACCGTGCAGGCAGCCGCAGAGACCTTGAGTGAGGTAGCCTCCGGGGAT |
| | | | | TACAAGGACGACGATGACAAGTAA |
| 1038. | huPSMArat281- | artificial | aa | MWNLLHETDSAVATARRPRWLCAGALVLAGGFFLLGFLFGWFIKSSNEATNITPKHNM |
| | 284 | | | KAFLDELKAENIKKFLYNFTQIPHLAGTEQNFQLAKQIQSQWKEFGLDSVELAHYDVLLS |
| | | | | YPNKTHPNYISIINEDGNEIFNTSLFEPPPPGYENVSDIVPPFSAFSPQGMPEGDLVYVN |
| | | | | YARTEDFFKLERDMKINCSGKIVIARYGKVFRGNKVKNAQLAGAKGVILYSDPADYFAP |
| | | | | GVKSYPDGWNLPGGGVQRGNILNLNGAGDPLTPGYPANEYAYRHEFTEAVGLPSIPVH |
| | | | | PIGYYDAQKLLEKMGGSAPPDSSWRGSLKVPYNVGPGFTGNFSTQKVKMHIHSTNEVT |
| | | | | RIYNVIGTLRGAVEPDRYVILGGHRDSWVFGGIDPQSGAAVVHEIVRSFGTLKKEGWRP |
| | | | | RRTILFASWDAEEFGLLGSTEWAEENSRLLQERGVAYINADSSIEGNYTLRVDCTPLMY |
| | | | | SLVHNLTKELKSPDEGFEGKSLYESWTKKSPSPEFSGMPRISKLGSGNDFEVFFQRLGI |
| | | | | ASGRARYTKNWETNKFSGYPLYHSVYETYELVEKFYDPMFKYHLTVAQVRGGMVFELA |
| | | | | NSIVLPFDCRDYAVVLRKYADKIYSISMKHPQEMKTYSVSFDSLFSAVKNFTEIASKFSE |
| | | | | RLQDFDKSNPIVLRMMNDQLMFLERAFIDPLGLPDRPFYRHVIYAPSSHNKYAGESFPGI |
| | | | | YDALFDIESKVDPSKAWGEVKRQIYVAAFTVQAAAETLSEVASGDYKDDDDK |
| 1039. | huPSMArat300- | artificial | nt | ATGTGGAATCTGCTTCACGAAACAGACTCGGCTGTCGCCACCGCGCGGCGCCCGC |
| | 344 | | | GGTGGCTGTGCGCCGGGGCGCTGGTCCTGGCGGGTGGATTCTTTCTCCTGGGCTT |
| | | | | CCTCTTTGGGTGGTTTATCAAATCCTCCAACGAAGCTACTAATATTACTCCAAAACAT |
| | | | | AATATGAAGGCATTTTTGGACGAATTGAAAGCCGAGAACATCAAAAAGTTCTTATAC |
| | | | | AATTTTACCCAGATACCACACTTAGCAGGAACCGAACAAAACTTCCAGCTTGCAAAA |
| | | | | CAAATTCAATCTCAGTGGAAAGAGTTTGGCCTGGACTCTGTTGAGCTGGCACATTAT |
| | | | | GACGTCCTGTTGTCTTACCCAAATAAAACTCATCCCAATTACATCTCAATCATTAATG |
| | | | | AAGACGGAAATGAGATCTTCAACACATCCTTATTTGAACCCCCTCCTCCAGGCTATG |
| | | | | AAAATGTGTCGGATATTGTGCCACCTTTCAGCGCTTTCTCTCCCCAAGGAATGCCCG |
| | | | | AGGGCGACCTAGTGTATGTGAACTATGCACGGACTGAAGACTTTTTTAAATTGGAGC |
| | | | | GGGACATGAAGATCAATTGCTCCGGGAAAATTGTGATTGCCAGATACGGGAAAGTT |
| | | | | TTTAGAGGAAATAAAGTTAAAAATGCTCAGCTGGCAGGCGCCAAAGGAGTGATTCT |
| | | | | CTACTCTGACCCTGCTGATTACTTTGCTCCCGGGGTGAAGTCATATCCAGATGGCT |
| | | | | GGAATCTTCCCGGAGGTGGTGTGCAGCGTGGAAACATCCTAAATCTCAATGGTGCA |
| | | | | GGCGACCCGTTAACCCCAGGTTACCCCGCAAATGAATACGCTTATAGGCGGGGAAT |
| | | | | TGCAGAAGCTGTTGGTCTGCCAAGTATTCCAGTTCATCCAATCGGATACGATGATGC |
| | | | | CCAGAAACTATTAGAACATATGGGTGGCTCCGCACCCCCTGACAGCAGCTGGAAGG |
| | | | | GAGGACTAAAAGTGCCTTACAACGTGGGACCTGGCTTCGCTGGAAACTTCTCAAAA |
| | | | | CAAAAGGTCAAGCTGCACATCCATTCTACCAATGAGGTGACAAGAATCTACAATGTG |
| | | | | ATCGGTACTCTCAGGGGAGCAGTGGAGCCAGACCGGTATGTCATTCTCGGAGGTC |
| | | | | ACCGCGACTCATGGGTCTTTGGTGGTATCGACCCTCAGAGCGGAGCAGCTGTGGT |
| | | | | TCATGAAATCGTGAGGAGCTTCGGAACACTGAAGAAGGAAGGCTGGAGACCTAGG |
| | | | | AGAACAATCTTGTTTGCAAGTTGGGATGCAGAGGAATTTGGTCTGCTTGGTTCTACC |
| | | | | GAGTGGGCAGAAGAGAACTCAAGACTCCTGCAAGAGCGTGGAGTGGCTTATATCAA |
| | | | | TGCTGACTCCTCTATAGAAGGCAACTACACCCTGAGAGTTGACTGTACACCCCTGAT |
| | | | | GTACAGTTTGGTACACAATCTAACAAAAGAACTGAAAAGCCCCGATGAAGGCTTCGA |
| | | | | AGGCAAATCCCTTTATGAAAGCTGGACTAAAAAGAGTCCTTCCCCTGAGTTCAGTGG |
| | | | | AATGCCCAGGATCAGCAAATTGGGCTCTGGAAATGACTTTGAGGTGTTTTTCCAACG |
| | | | | ACTGGGAATTGCTTCCGGCAGAGCACGCTATACTAAAAACTGGGAAACAAATAAATT |
| | | | | CAGTGGCTATCCCCTGTATCACAGCGTCTATGAAACCTATGAGTTGGTCGAAAAGTT |
| | | | | TTACGATCCAATGTTCAAATATCACCTGACTGTGGCTCAGGTTCGAGGCGGGATGG |
| | | | | TGTTCGAGCTAGCCAACTCCATAGTGCTGCCTTTTGATTGCCGAGATTATGCCGTAG |
| | | | | TTTTAAGGAAGTATGCTGATAAAATCTACAGCATTTCTATGAAGCATCCACAGGAGA |
| | | | | TGAAGACATATAGTGTATCATTCGATTCACTTTTCTCTGCAGTGAAGAATTTTACCGA |
| | | | | AATTGCTTCTAAGTTTAGTGAGAGGCTCCAGGACTTCGACAAAAGCAATCCAATAGT |
| | | | | ATTGAGAATGATGAACGATCAACTGATGTTTCTGGAGAGAGCATTTATCGATCCATT |
| | | | | AGGCTTACCAGACCGCCCTTTTTATAGACATGTCATCTACGCTCCAAGCAGTCACAA |
| | | | | CAAGTACGCAGGGGAGTCCTTCCCAGGAATCTATGATGCCCTGTTTGACATTGAAA |
| | | | | GCAAGGTGGACCCTTCTAAGGCCTGGGGCGAAGTGAAGAGGCAGATTTATGTGGC |
| | | | | AGCCTTCACCGTGCAGGCAGCCGCAGAGACCTTGAGTGAGGTAGCCTCCGGGGAT |
| | | | | TACAAGGACGACGATGACAAGTAA |
| 1040. | huPSMArat300- | artificial | aa | MWNLLHETDSAVATARRPRWLCAGALVLAGGFFLLGFLFGWFIKSSNEATNITPKHNM |
| | 344 | | | KAFLDELKAENIKKFLYNFTQIPHLAGTEQNFQLAKQIQSQWKEFGLDSVELAHYDVLLS |
| | | | | YPNKTHPNYISIINEDGNEIFNTSLFEPPPPGYENVSDIVPPFSAFSPQGMPEGDLVYVN |
| | | | | YARTEDFFKLERDMKINCSGKIVIARYGKVFRGNKVKNAQLAGAKGVILYSDPADYFAP |
| | | | | GVKSYPDGWNLPGGGVQRGNILNLNGAGDPLTPGYPANEYAYRRGIAEAVGLPSIPVH |
| | | | | PIGYDDAQKLLEHMGGSAPPDSSWKGGLKVPYNVGPGFAGNFSKQKVKLHIHSTNEVT |
| | | | | RIYNVIGTLRGAVEPDRYVILGGHRDSWVFGGIDPQSGAAVVHEIVRSFGTLKKEGWRP |
| | | | | RRTILFASWDAEEFGLLGSTEWAEENSRLLQERGVAYINADSSIEGNYTLRVDCTPLMY |
| | | | | SLVHNLTKELKSPDEGFEGKSLYESWTKKSPSPEFSGMPRISKLGSGNDFEVFFQRLGI |
| | | | | ASGRARYTKNWETNKFSGYPLYHSVYETYELVEKFYDPMFKYHLTVAQVRGGMVFELA |
| | | | | NSIVLPFDCRDYAVVLRKYADKIYSISMKHPQEMKTYSVSFDSLFSAVKNFTEIASKFSE |
| | | | | RLQDFDKSNPIVLRMMNDQLMFLERAFIDPLGLPDRPFYRHVIYAPSSHNKYAGESFPGI |
| | | | | YDALFDIESKVDPSKAWGEVKRQIYVAAFTVQAAAETLSEVASGDYKDDDDK |
| 1041. | huPSMArat598- | artificial | nt | ATGTGGAATCTGCTTCACGAAACAGACTCGGCTGTCGCCACCGCGCGGCGCCCGC |
| | 617 | | | GGTGGCTGTGCGCCGGGGCGCTGGTCCTGGCGGGTGGATTCTTTCTCCTGGGCTT |
| | | | | CCTCTTTGGGTGGTTTATCAAATCCTCCAACGAAGCTACTAATATTACTCCAAAACAT |
| | | | | AATATGAAGGCATTTTTGGACGAATTGAAAGCCGAGAACATCAAAAAGTTCTTATAC |
| | | | | AATTTTACCCAGATACCACACTTAGCAGGAACCGAACAAAACTTCCAGCTTGCAAAA |
| | | | | CAAATTCAATCTCAGTGGAAAGAGTTTGGCCTGGACTCTGTTGAGCTGGCACATTAT |
| | | | | GACGTCCTGTTGTCTTACCCAAATAAAACTCATCCCAATTACATCTCAATCATTAATG |
| | | | | AAGACGGAAATGAGATCTTCAACACATCCTTATTTGAACCCCCTCCTCCAGGCTATG |
| | | | | AAAATGTGTCGGATATTGTGCCACCTTTCAGCGCTTTCTCTCCCCAAGGAATGCCCG |
| | | | | AGGGCGACCTAGTGTATGTGAACTATGCACGGACTGAAGACTTTTTTAAATTGGAGC |
| | | | | GGGACATGAAGATCAATTGCTCCGGGAAAATTGTGATTGCCAGATACGGGAAAGTT |
| | | | | TTTAGAGGAAATAAAGTTAAAAATGCTCAGCTGGCAGGCGCCAAAGGAGTGATTCT |
| | | | | CTACTCTGACCCTGCTGATTACTTTGCTCCCGGGGTGAAGTCATATCCAGATGGCT |
| | | | | GGAATCTTCCCGGAGGTGGTGTGCAGCGTGGAAACATCCTAAATCTCAATGGTGCA |
| | | | | GGCGACCCTCTCACCCCAGGTTACCCCGCAAATGAATACGCTTATAGGCGGGGAAT |
| | | | | TGCAGAAGCTGTTGGTCTGCCAAGTATTCCAGTTCATCCAATCGGATACTATGACGC |
| | | | | ACAGAAGCTGCTAGAAAAGATGGGTGGCTCCGCACCACCAGACAGCAGCTGGAGG |
| | | | | GGAAGTCTCAAGGTGCCCTACAACGTTGGACCTGGATTTACTGGAAATTTTTCTACA |
| | | | | CAGAAAGTCAAAATGCACATCCATTCTACCAATGAGGTGACAAGAATCTACAATGTG |
| | | | | ATCGGTACTCTCAGGGGAGCAGTGGAGCCAGACAGGTATGTCATTCTCGGAGGTC |
| | | | | ACCGCGACTCATGGGTCTTTGGTGGTATCGACCCTCAGAGCGGAGCAGCTGTGGT |
| | | | | TCATGAAATCGTGAGGAGCTTCGGAACACTGAAGAAGGAAGGCTGGAGACCTAGG |
| | | | | AGAACAATCTTGTTTGCAAGTTGGGATGCAGAGGAATTTGGTCTGCTTGGTTCTACC |
| | | | | GAGTGGGCAGAAGAGAACTCAAGACTCCTGCAAGAGCGTGGAGTGGCTTATATCAA |
| | | | | TGCTGACTCCTCTATAGAAGGCAACTACACCCTGAGAGTTGACTGTACACCCCTGAT |
| | | | | GTACAGTTTGGTACACAATCTAACAAAAGAACTGAAAAGCCCCGATGAAGGCTTCGA |
| | | | | AGGCAAATCCCTTTATGAAAGCTGGACTAAAAAGAGTCCTTCCCCTGAGTTCAGTGG |
| | | | | AATGCCCAGGATCAGCAAATTGGGCTCTGGAAATGACTTTGAGGTGTTTTTCCAACG |
| | | | | ACTGGGAATTGCTTCCGGCAGAGCACGCTATACTAAAAACTGGGAAACAAATAAATT |
| | | | | CAGTGGCTATCCCCTGTATCACAGCGTCTATGAAACCTATGAGTTGGTCGAAAAGTT |
| | | | | TTACGATCCAATGTTCAAATATCACCTGACTGTGGCTCAGGTTCGAGGCGGGATGG |
| | | | | TGTTCGAGCTCGCCAACTCCATAGTGCTGCCTTTTGATTGCCAAAGTTATGCTGTAG |
| | | | | CTCTGAAGAAACATGCTGAGACTATCTACAACATTTCAATGAATCATCCACAGGAGA |
| | | | | TGAAGACATATAGTGTAAGCTTCGATTCACTTTTCTCTGCAGTGAAGAATTTTACCGA |
| | | | | AATTGCTTCTAAGTTTAGTGAGAGGCTCCAGGACTTCGACAAAAGCAATCCAATAGT |
| | | | | ATTGAGAATGATGAACGATCAACTGATGTTTCTGGAGAGAGCATTTATCGATCCATT |
| | | | | AGGCTTACCAGACCGCCCTTTTTATAGACATGTCATCTACGCTCCAAGCAGTCACAA |
| | | | | CAAGTACGCAGGGGAGTCCTTCCCAGGAATCTATGACGCGTTGTTTGACATTGAAA |
| | | | | GCAAGGTGGACCCTTCTAAGGCCTGGGGCGAAGTGAAGAGGCAGATTTATGTGGC |
| | | | | AGCCTTCACCGTGCAGGCAGCCGCAGAGACCTTGAGTGAGGTAGCCTCCGGGGAT |
| | | | | TACAAGGACGACGATGACAAGTAA |
| 1042. | huPSMArat598- | artificial | aa | MWNLLHETDSAVATARRPRWLCAGALVLAGGFFLLGFLFGWFIKSSNEATNITPKHNM |
| | 617 | | | KAFLDELKAENIKKFLYNFTQIPHLAGTEQNFQLAKQIQSQWKEFGLDSVELAHYDVLLS |
| | | | | YPNKTHPNYISIINEDGNEIFNTSLFEPPPPGYENVSDIVPPFSAFSPQGMPEGDLVYVN |
| | | | | YARTEDFFKLERDMKINCSGKIVIARYGKVFRGNKVKNAQLAGAKGVILYSDPADYFAP |
| | | | | GVKSYPDGWNLPGGGVQRGNILNLNGAGDPLTPGYPANEYAYRRGIAEAVGLPSIPVH |
| | | | | PIGYYDAQKLLEKMGGSAPPDSSWRGSLKVPYNVGPGFTGNFSTQKVKMHIHSTNEVT |
| | | | | RIYNVIGTLRGAVEPDRYVILGGHRDSWVFGGIDPQSGAAVVHEIVRSFGTLKKEGWRP |
| | | | | RRTILFASWDAEEFGLLGSTEWAEENSRLLQERGVAYINADSSIEGNYTLRVDCTPLMY |
| | | | | SLVHNLTKELKSPDEGFEGKSLYESWTKKSPSPEFSGMPRISKLGSGNDFEVFFQRLGI |
| | | | | ASGRARYTKNWETNKFSGYPLYHSVYETYELVEKFYDPMFKYHLTVAQVRGGMVFELA |
| | | | | NSIVLPFDCQSYAVALKKHAETIYNISMNHPQEMKTYSVSFDSLFSAVKNFTEIASKFSE |
| | | | | RLQDFDKSNPIVLRMMNDQLMFLERAFIDPLGLPDRPFYRHVIYAPSSHNKYAGESFPGI |
| | | | | YDALFDIESKVDPSKAWGEVKRQIYVAAFTVQAAAETLSEVASGDYKDDDDK |
| 1043. | huPSMArat683- | artificial | nt | ATGTGGAATCTGCTTCACGAAACAGACTCGGCTGTCGCCACCGCGCGGCGCCCGC |
| | 690 | | | GGTGGCTGTGCGCCGGGGCGCTGGTCCTGGCGGGTGGATTCTTTCTCCTGGGCTT |
| | | | | CCTCTTTGGGTGGTTTATCAAATCCTCCAACGAAGCTACTAATATTACTCCAAAACAT |
| | | | | AATATGAAGGCATTTTTGGACGAATTGAAAGCCGAGAACATCAAAAAGTTCTTATAC |
| | | | | AATTTTACCCAGATACCACACTTAGCAGGAACCGAACAAAACTTCCAGCTTGCAAAA |
| | | | | CAAATTCAATCTCAGTGGAAAGAGTTTGGCCTGGACTCTGTTGAGCTGGCACATTAT |
| | | | | GACGTCCTGTTGTCTTACCCAAATAAAACTCATCCCAATTACATCTCAATCATTAATG |
| | | | | AAGACGGAAATGAGATCTTCAACACATCCTTATTTGAACCCCCTCCTCCAGGCTATG |
| | | | | AAAATGTGTCGGATATTGTGCCACCTTTCAGCGCTTTCTCTCCCCAAGGAATGCCCG |
| | | | | AGGGCGACCTAGTGTATGTGAACTATGCACGGACTGAAGACTTTTTTAAATTGGAGC |
| | | | | GGGACATGAAGATCAATTGCTCCGGGAAAATTGTGATTGCCAGATACGGGAAAGTT |
| | | | | TTTAGAGGAAATAAAGTTAAAAATGCTCAGCTGGCAGGCGCCAAAGGAGTGATTCT |
| | | | | CTACTCTGACCCTGCTGATTACTTTGCTCCCGGGGTGAAGTCATATCCAGATGGCT |
| | | | | GGAATCTTCCCGGAGGTGGTGTGCAGCGTGGAAACATCCTAAATCTCAATGGTGCA |
| | | | | GGCGACCCTCTCACCCCAGGTTACCCCGCAAATGAATACGCTTATAGGCGGGGAAT |
| | | | | TGCAGAAGCTGTTGGTCTGCCAAGTATTCCAGTTCATCCAATCGGATACTATGACGC |
| | | | | ACAGAAGCTGCTAGAAAAGATGGGTGGCTCCGCACCACCAGACAGCAGCTGGAGG |
| | | | | GGAAGTCTCAAGGTGCCCTACAACGTTGGACCTGGATTTACTGGAAATTTTTCTACA |
| | | | | CAGAAAGTCAAAATGCACATCCATTCTACCAATGAGGTGACAAGAATCTACAATGTG |
| | | | | ATCGGTACTCTCAGGGGAGCAGTGGAGCCAGACAGGTATGTCATTCTCGGAGGTC |
| | | | | ACCGCGACTCATGGGTCTTTGGTGGTATCGACCCTCAGAGCGGAGCAGCTGTGGT |
| | | | | TCATGAAATCGTGAGGAGCTTCGGAACACTGAAGAAGGAAGGCTGGAGACCTAGG |
| | | | | AGAACAATCTTGTTTGCAAGTTGGGATGCAGAGGAATTTGGTCTGCTTGGTTCTACC |
| | | | | GAGTGGGCAGAAGAGAACTCAAGACTCCTGCAAGAGCGTGGAGTGGCTTATATCAA |
| | | | | TGCTGACTCCTCTATAGAAGGCAACTACACCCTGAGAGTTGACTGTACACCCCTGAT |
| | | | | GTACAGTTTGGTACACAATCTAACAAAAGAACTGAAAAGCCCCGATGAAGGCTTCGA |
| | | | | AGGCAAATCCCTTTATGAAAGCTGGACTAAAAAGAGTCCTTCCCCTGAGTTCAGTGG |
| | | | | AATGCCCAGGATCAGCAAATTGGGCTCTGGAAATGACTTTGAGGTGTTTTTCCAACG |
| | | | | ACTGGGAATTGCTTCCGGCAGAGCACGCTATACTAAAAACTGGGAAACAAATAAATT |
| | | | | CAGTGGCTATCCCCTGTATCACAGCGTCTATGAAACCTATGAGTTGGTCGAAAAGTT |
| | | | | TTACGATCCAATGTTCAAATATCACCTGACTGTGGCTCAGGTTCGAGGCGGGATGG |
| | | | | TGTTCGAGCTCGCCAACTCCATAGTGCTGCCTTTTGATTGCCGAGATTATGCCGTAG |
| | | | | TTTTAAGGAAGTATGCTGATAAAATCTACAGCATTTCTATGAAGCATCCACAGGAGA |
| | | | | TGAAGACATATAGTGTATCATTCGATTCACTTTTCTCTGCAGTGAAGAATTTTACCGA |
| | | | | AATTGCTTCTAAGTTTAGTGAGAGGCTCCAGGACTTCGACAAAAGCAATCCAATAGT |
| | | | | ATTGAGAATGATGAACGATCAACTGATGTTTCTGGAGCGCGCATTTATCGATCCATT |
| | | | | AGGCTTACCAGGAAGGCCTTTCTACAGGCATATCATCTACGCTCCAAGCAGTCACA |
| | | | | ACAAGTACGCAGGGGAGTCCTTCCCAGGAATCTATGACGCGTTGTTTGACATTGAA |
| | | | | AGCAAGGTGGACCCTTCTAAGGCCTGGGGCGAAGTGAAGAGGCAGATTTATGTGG |
| | | | | CAGCCTTCACCGTGCAGGCAGCCGCAGAGACCTTGAGTGAGGTAGCCTCCGGGGA |
| | | | | TTACAAGGACGACGATGACAAGTAA |
| 1044. | huPSMArat683- | artificial | aa | MWNLLHETDSAVATARRPRWLCAGALVLAGGFFLLGFLFGWFIKSSNEATNITPKHNM |
| | 690 | | | KAFLDELKAENIKKFLYNFTQIPHLAGTEQNFQLAKQIQSQWKEFGLDSVELAHYDVLLS |
| | | | | YPNKTHPNYISIINEDGNEIFNTSLFEPPPPGYENVSDIVPPFSAFSPQGMPEGDLVYVN |
| | | | | YARTEDFFKLERDMKINCSGKIVIARYGKVFRGNKVKNAQLAGAKGVILYSDPADYFAP |
| | | | | GVKSYPDGWNLPGGGVQRGNILNLNGAGDPLTPGYPANEYAYRRGIAEAVGLPSIPVH |
| | | | | PIGYYDAQKLLEKMGGSAPPDSSWRGSLKVPYNVGPGFTGNFSTQKVKMHIHSTNEVT |
| | | | | RIYNVIGTLRGAVEPDRYVILGGHRDSWVFGGIDPQSGAAVVHElVRSFGTLKKEGWRP |
| | | | | RRTILFASWDAEEFGLLGSTEWAEENSRLLQERGVAYINADSSIEGNYTLRVDCTPLMY |
| | | | | SLVHNLTKELKSPDEGFEGKSLYESWTKKSPSPEFSGMPRISKLGSGNDFEVFFQRLGI |
| | | | | ASGRARYTKNWETNKFSGYPLYHSVYETYELVEKFYDPMFKYHLTVAQVRGGMVFELA |
| | | | | NSIVLPFDCRDYAVVLRKYADKIYSISMKHPQEMKTYSVSFDSLFSAVKNFTEIASKFSE |
| | | | | RLQDFDKSNPIVLRMMNDQLMFLERAFIDPLGLPGRPFYRHIIYAPSSHNKYAGESFPGI |
| | | | | YDALFDIESKVDPSKAWGEVKRQIYVAAFTVQAAAETLSEVASGDYKDDDDK |
| 1045. | huPSMArat716- | artificial | nt | ATGTGGAATCTGCTTCACGAAACAGACTCGGCTGTCGCCACCGCGCGGCGCCCGC |
| | 750 | | | GGTGGCTGTGCGCCGGGGCGCTGGTCCTGGCGGGTGGATTCTTTCTCCTGGGCTT |
| | | | | CCTCTTTGGGTGGTTTATCAAATCCTCCAACGAAGCTACTAATATTACTCCAAAACAT |
| | | | | AATATGAAGGCATTTTTGGACGAATTGAAAGCCGAGAACATCAAAAAGTTCTTATAC |
| | | | | AATTTTACCCAGATACCACACTTAGCAGGAACCGAACAAAACTTCCAGCTTGCAAAA |
| | | | | CAAATTCAATCTCAGTGGAAAGAGTTTGGCCTGGACTCTGTTGAGCTGGCACATTAT |
| | | | | GACGTCCTGTTGTCTTACCCAAATAAAACTCATCCCAATTACATCTCAATCATTAATG |
| | | | | AAGACGGAAATGAGATCTTCAACACATCCTTATTTGAACCCCCTCCTCCAGGCTATG |
| | | | | AAAATGTGTCGGATATTGTGCCACCTTTCAGCGCTTTCTCTCCCCAAGGAATGCCCG |
| | | | | AGGGCGACCTAGTGTATGTGAACTATGCACGGACTGAAGACTTTTTTAAATTGGAGC |
| | | | | GGGACATGAAGATCAATTGCTCCGGGAAAATTGTGATTGCCAGATACGGGAAAGTT |
| | | | | TTTAGAGGAAATAAAGTTAAAAATGCTCAGCTGGCAGGCGCCAAAGGAGTGATTCT |
| | | | | CTACTCTGACCCTGCTGATTACTTTGCTCCCGGGGTGAAGTCATATCCAGATGGCT |
| | | | | GGAATCTTCCCGGAGGTGGTGTGCAGCGTGGAAACATCCTAAATCTCAATGGTGCA |
| | | | | GGCGACCCTCTCACCCCAGGTTACCCCGCAAATGAATACGCTTATAGGCGGGGAAT |
| | | | | TGCAGAAGCTGTTGGTCTGCCAAGTATTCCAGTTCATCCAATCGGATACTATGACGC |
| | | | | ACAGAAGCTGCTAGAAAAGATGGGTGGCTCCGCACCACCAGACAGCAGCTGGAGG |
| | | | | GGAAGTCTCAAGGTGCCCTACAACGTTGGACCTGGATTTACTGGAAATTTTTCTACA |
| | | | | CAGAAAGTCAAAATGCACATCCATTCTACCAATGAGGTGACAAGAATCTACAATGTG |
| | | | | ATCGGTACTCTCAGGGGAGCAGTGGAGCCAGACAGGTATGTCATTCTCGGAGGTC |
| | | | | ACCGCGACTCATGGGTCTTTGGTGGTATCGACCCTCAGAGCGGAGCAGCTGTGGT |
| | | | | TCATGAAATCGTGAGGAGCTTCGGAACACTGAAGAAGGAAGGCTGGAGACCTAGG |
| | | | | AGAACAATCTTGTTTGCAAGTTGGGATGCAGAGGAATTTGGTCTGCTTGGTTCTACC |
| | | | | GAGTGGGCAGAAGAGAACTCAAGACTCCTGCAAGAGCGTGGAGTGGCTTATATCAA |
| | | | | TGCTGACTCCTCTATAGAAGGCAACTACACCCTGAGAGTTGACTGTACACCCCTGAT |
| | | | | GTACAGTTTGGTACACAATCTAACAAAAGAACTGAAAAGCCCCGATGAAGGCTTCGA |
| | | | | AGGCAAATCCCTTTATGAAAGCTGGACTAAAAAGAGTCCTTCCCCTGAGTTCAGTGG |
| | | | | AATGCCCAGGATCAGCAAATTGGGCTCTGGAAATGACTTTGAGGTGTTTTTCCAACG |
| | | | | ACTGGGAATTGCTTCCGGCAGAGCACGCTATACTAAAAACTGGGAAACAAATAAATT |
| | | | | CAGTGGCTATCCCCTGTATCACAGCGTCTATGAAACCTATGAGTTGGTCGAAAAGTT |
| | | | | TTACGATCCAATGTTCAAATATCACCTGACTGTGGCTCAGGTTCGAGGCGGGATGG |
| | | | | TGTTCGAGCTCGCCAACTCCATAGTGCTGCCTTTTGATTGCCGAGATTATGCCGTAG |
| | | | | TTTTAAGGAAGTATGCTGATAAAATCTACAGCATTTCTATGAAGCATCCACAGGAGA |
| | | | | TGAAGACATATAGTGTATCATTCGATTCACTTTTCTCTGCAGTGAAGAATTTTACCGA |
| | | | | AATTGCTTCTAAGTTTAGTGAGAGGCTCCAGGACTTCGACAAAAGCAATCCAATAGT |
| | | | | ATTGAGAATGATGAACGATCAACTGATGTTTCTGGAGCGCGCATTTATCGATCCATT |
| | | | | AGGCTTACCAGACCGCCCTTTTTATAGACATGTCATCTACGCTCCAAGCAGTCACAA |
| | | | | CAAGTACGCAGGGGAGTCCTTCCCAGGAATCTATGACGCGTTGTTTGACATTAATAA |
| | | | | CAAAGTCGATACTTCTAAGGCCTGGAGAGAAGTGAAAAGACAGATTTCTATTGCAGC |
| | | | | CTTTACAGTGCAAGCTGCAGCAGAGACTCTGAGAGAAGTAGACTCCGGGGATTACA |
| | | | | AGGACGACGATGACAAGTAA |
| 1046. | huPSMArat716- | artificial | aa | MWNLLHETDSAVATARRPRWLCAGALVLAGGFFLLGFLFGWFIKSSNEATNITPKHNM |
| | 750 | | | KAFLDELKAENIKKFLYNFTQIPHLAGTEQNFQLAKQIQSQWKEFGLDSVELAHYDVLLS |
| | | | | YPNKTHPNYISIINEDGNEIFNTSLFEPPPPGYENVSDIVPPFSAFSPQGMPEGDLVYVN |
| | | | | YARTEDFFKLERDMKINCSGKIVIARYGKVFRGNKVKNAQLAGAKGVILYSDPADYFAP |
| | | | | GVKSYPDGWNLPGGGVQRGNILNLNGAGDPLTPGYPANEYAYRRGIAEAVGLPSIPVH |
| | | | | PIGYYDAQKLLEKMGGSAPPDSSWRGSLKVPYNVGPGFTGNFSTQKVKMHIHSTNEVT |
| | | | | RIYNVIGTLRGAVEPDRYVILGGHRDSWVFGGIDPQSGAAVVHEIVRSFGTLKKEGWRP |
| | | | | RRTILFASWDAEEFGLLGSTEWAEENSRLLQERGVAYINADSSIEGNYTLRVDCTPLMY |
| | | | | SLVHNLTKELKSPDEGFEGKSLYESWTKKSPSPEFSGMPRISKLGSGNDFEVFFQRLGI |
| | | | | ASGRARYTKNWETNKFSGYPLYHSVYETYELVEKFYDPMFKYHLTVAQVRGGMVFELA |
| | | | | NSIVLPFDCRDYAVVLRKYADKIYSISMKHPQEMKTYSVSFDSLFSAVKNFTEIASKFSE |
| | | | | RLQDFDKSNPIVLRMMNDQLMFLERAFIDPLGLPDRPFYRHVIYAPSSHNKYAGESFPGI |
| | | | | YDALFDINNKVDTSKAWREVKRQISIAAFTVQAAAETLREVDSGDYKDDDDK |
| 1047. | Macaca | Macaca | aa | QDGNEEMGSITQTPYQVSISGTTILTC |
| | fascicularis | fascicularis | | |
| | CD3ε 1-27 | | | |
| 1048. | Macaca | Macaca | aa | QDGNEEMGSITQTPYQVSISGTTVILT |
| | fascicularis | fascicularis | | |
| | CD3ε 1-27 | | | |
| 1049. | Macaca | Macaca | aa | QDGNEEMGSITQTPYHVSISGTTVILT |
| | mulatta | mulatta | | |
| | CD3ε 1-27 | | | |

1. A bispecific single chain antibody molecule comprising a first binding domain which is an antigen-interaction site, capable of binding to an epitope of human and Callithrix jacchus, Saguinis Oedipus or Saimiri sciures CD3E (epsilon) chain, wherein the epitope is part of an amino acid sequence comprised in the group consisting of SEQ ID NOs. 2, 4, 6, or 8, and comprises at least the amino sequence Gln-Asp-Gly-Asn-Glu (QDGNE), and a second binding domain capable of binding to prostate-specific membrane antigen (PSMA).

2. The bispecific single chain antibody molecule of claim 1, wherein at least one of said first or second binding domain is CDR-grafted, humanized or human.

3. The bispecific single chain antibody molecule according to claim 1, wherein the first binding domain capable of binding to an epitope of human and non-chimpanzee primate CD3ε chain comprises a VL region comprising CDR-L1, CDR-L2 and CDR-L3 selected from:
(a) CDR-L1 as depicted in SEQ ID NO. 27, CDR-L2 as depicted in SEQ ID NO. 28 and CDR-L3 as depicted in SEQ ID NO. 29;
(b) CDR-L1 as depicted in SEQ ID NO. 117, CDR-L2 as depicted in SEQ ID NO. 118 and CDR-L3 as depicted in SEQ ID NO. 119; and
(c) CDR-L1 as depicted in SEQ ID NO. 153, CDR-L2 as depicted in SEQ ID NO. 154 and CDR-L3 as depicted in SEQ ID NO. 155.

4. The bispecific single chain antibody molecule according to claim 1, wherein the first binding domain capable of binding to an epitope of human and non-chimpanzee primate CD3ε chain comprises a VH region comprising CDR-H 1, CDR-H2 and CDR-H3 selected from:
(a) CDR-H1 as depicted in SEQ ID NO. 12, CDR-H2 as depicted in SEQ ID NO. 13 and CDR-H3 as depicted in SEQ ID NO. 14;
(b) CDR-H1 as depicted in SEQ ID NO. 30, CDR-H2 as depicted in SEQ ID NO. 31 and CDR-H3 as depicted in SEQ ID NO. 32;
(c) CDR-H1 as depicted in SEQ ID NO. 48, CDR-H2 as depicted in SEQ ID NO. 49 and CDR-H3 as depicted in SEQ ID NO. 50;
(d) CDR-H1 as depicted in SEQ ID NO. 66, CDR-H2 as depicted in SEQ ID NO. 67 and CDR-H3 as depicted in SEQ ID NO. 68;
(e) CDR-H1 as depicted in SEQ ID NO. 84, CDR-H2 as depicted in SEQ ID NO. 85 and CDR-H3 as depicted in SEQ ID NO. 86;
(f) CDR-H1 as depicted in SEQ ID NO. 102, CDR-H2 as depicted in SEQ ID NO. 103 and CDR-H3 as depicted in SEQ ID NO. 104;
(g) CDR-H1 as depicted in SEQ ID NO. 120, CDR-H2 as depicted in SEQ ID NO. 121 and CDR-H3 as depicted in SEQ ID NO. 122;
(h) CDR-H1 as depicted in SEQ ID NO. 138, CDR-H2 as depicted in SEQ ID NO. 139 and CDR-H3 as depicted in SEQ ID NO. 140;
(i) CDR-H1 as depicted in SEQ ID NO. 156, CDR-H2 as depicted in SEQ ID NO. 157 and CDR-H3 as depicted in SEQ ID NO. 158; and
(j) CDR-H1 as depicted in SEQ ID NO. 174, CDR-H2 as depicted in SEQ ID NO. 175 and CDR-H3 as depicted in SEQ ID NO. 176.

5. The bispecific single chain antibody molecule according claim 1, wherein the first binding domain capable of binding to an epitope of human and non-chimpanzee primate CD3ε chain comprises a VL region selected from the group consisting of a VL region as depicted in SEQ ID NO. 35, 39, 125, 129, 161 or 165.

6. The bispecific single chain antibody molecule according to claim 1, wherein the first binding domain capable of binding to an epitope of human and non-chimpanzee primate CD3ε chain comprises a VH region selected from the group consisting of a VH region as depicted in SEQ ID NO. 15, 19, 33, 37, 51, 55, 69, 73, 87, 91, 105, 109, 123, 127, 141, 145, 159, 163, 177 or 181.

7. The bispecific single chain antibody molecule according to claim 1, wherein the first binding domain capable of binding to an epitope of human and non-chimpanzee primate CD3ε chain comprises a VL region and a VH region selected from the group consisting of:
(a) a VL region as depicted in SEQ ID NO. 17 or 21 and a VH region as depicted in SEQ ID NO. 15 or 19;
(b) a VL region as depicted in SEQ ID NO. 35 or 39 and a VH region as depicted in SEQ ID NO. 33 or 37;
(c) a VL region as depicted in SEQ ID NO. 53 or 57 and a VH region as depicted in SEQ ID NO. 51 or 55;
(d) a VL region as depicted in SEQ ID NO. 71 or 75 and a VII region as depicted in SEQ ID NO. 69 or 73;
(e) a VL region as depicted in SEQ ID NO. 89 or 93 and a VH region as depicted in SEQ ID NO. 87 or 91;
(f) a VL region as depicted in SEQ ID NO. 107 or 111 and a VH region as depicted in SEQ ID NO. 105 or 109;
(g) a VL region as depicted in SEQ ID NO. 125 or 129 and a VH region as depicted in SEQ ID NO. 123 or 127;
(h) a VL region as depicted in SEQ ID NO. 143 or 147 and a VH region as depicted in SEQ ID NO. 141 or 145;
(i) a VL region as depicted in SEQ ID NO. 161 or 165 and a VH region as depicted in SEQ ID NO. 159 or 163; and
(j) a VL region as depicted in SEQ ID NO. 179 or 183 and a VH region as depicted in SEQ ID NO. 177 or 181.

8. The bispecific single chain antibody molecule according to claim 7, wherein the first binding domain capable of binding to an epitope of human and nonchimpanzee primate CDR chain comprises an amino acid sequence selected from the group consisting of SEQ ID NOs: 23, 25, 41, 43, 59, 61, 77, 79, 95, 97, 113, 115, 131, 133, 149, 151, 167, 169, 185 or 187.

9. The bispecific single chain antibody molecule according to claim 1, wherein the second binding domain is capable of binding to human PSMA and/or a non-Chimpanzee primate PSMA.

10. The bispecific single chain antibody molecule according to claim 9, wherein the bispecific single chain antibody molecule comprises a group of the following sequences as CDR H1, CDR H2, CDR H1-3, CDR L1, CDR L2 and CDR L3 in the second binding domain selected from:
a) CDR H1-3 of SEQ ID NO: 394-396 and CDR L1-3 of SEQ ID NO: 389-391;
b) CDR H1-3 of SEQ ID NO: 408-410 and CDR L1-3 of SEQ ID NO: 403-405;
c) CDR H1-3 of SEQ ID NO: 422-424 and CDR L1-3 of SEQ ID NO: 417 419;
d) CDR H1-3 of SEQ ID NO: 436-438 and CDR L1-3 of SEQ ID NO: 431-433;
e) CDR H1-3 of SEQ ID NO: 445-447 and CDR L1-3 of SEQ ID NO: 450-452;
f) CDR H1-3 of SEQ ID NO: 464-466 and CDR L1-3 of SEQ ID NO: 459-461;
g) CDR H1-3 of SEQ ID NO: 478-480 and CDR L1-3 of SEQ ID NO: 473-475;
h) CDR H1-3 of SEQ ID NO: 492-494 and CDR L1-3 of SEQ ID NO: 487-489;
i) CDR H1-3 of SEQ ID NO: 506-508 and CDR L1-3 of SEQ ID NO: 501-503;
j) CDR H1-3 of SEQ ID NO: 520-522 and CDR L1-3 of SEQ ID NO: 515-517;
k) CDR H1-3 of SEQ ID NO: 534-536 and CDR L1-3 of SEQ ID NO: 529-531;
l) CDR H1-3 of SEQ ID NO: 548-550 and CDR L1-3 of SEQ ID NO: 543-545;
m) CDR H1-3 of SEQ ID NO: 562-564 and CDR L1-3 of SEQ ID NO: 557-559;
n) CDR H-1-3 of SEQ ID NO: 576-578 and CDR L1-3 of SEQ ID NO: 571-573;
o) CDR H1-3 of SEQ ID NO: 590-592 and CDR L1-3 of SEQ ID NO: 585-587;
p) CDR H1-3 of SEQ ID NO: 604-606 and CDR L1-3 of SEQ ID NO: 599-601;
q) CDR H1-3 of SEQ ID NO: 618-620 and CDR L1-3 of SEQ ID NO: 613-615;
r) CDR H1-3 of SEQ ID NO: 632-634 and CDR L1-3 of SEQ ID NO: 627-629;
s) CDR H1-3 of SEQ ID NO: 646-648 and CDR L1-3 of SEQ ID NO: 641-643;
t) CDR H1-3 of SEQ ID NO: 660-662 and CDR L1-3 of SEQ ID NO: 655-657;
u) CDR H1-3 of SEQ ID NO: 674-676 and CDR L1-3 of SEQ ID NO: 669-671;
v) CDR H1-3 of SEQ ID NO: 688-690 and CDR L1-3 of SEQ ID NO: 683-685;
w) CDR H1-3 of SEQ ID NO: 702-704 and CDR L1-3 of SEQ ID NO: 697-699;
x) CDR H1-3 of SEQ ID NO: 716-718 and CDR L1-3 of SEQ ID NO: 711-713;
y) CDR H1-3 of SEQ ID NO: 729-731 and CDR L1-3 of SEQ ID NO: 724-726;
z) CDR H1-3 of SEQ ID NO: 788-790 and CDR L1-3 of SEQ ID NO: 793-795;
aa) CDR H1-3 of SEQ ID NO: 806-808 and CDR L1-3 of SEQ ID NO: 811-813;
ab) CDR H1-3 of SEQ ID NO: 852-854 and CDR L1-3 of SEQ ID NO: 857-859;
ac) CDR H1-3 of SEQ ID NO: 838-840 and CDR L1-3 of SEQ ID NO: 843-845;
ad) CDR H1-3 of SEQ ID NO: 824-826 and CDR L1-3 of SEQ ID NO: 829-831;
ae) CDR H1-3 of SEQ ID NO: 774-776 and CDR L1-3 of SEQ ID NO: 779-781;
af) CDR H1-3 of SEQ ID NO: 688-690 and CDR L1-3 of SEQ ID NO: 683-685;
ag) CDR H1-3 of SEQ ID NO: 870-872 and CDR L1-3 of SEQ ID NO: 875-877;
ah) CDR H1-3 of SEQ ID NO: 888-890 and CDR L1-3 of SEQ ID NO: 893-895;
ai) CDR H1-3 of SEQ ID NO: 924-926 and CDR L1-3 of SEQ ID NO: 929-931;
aj) CDR H1-3 of SEQ ID NO: 1019-1021 and CDR L1-3 of SEQ ID NO: 1025-1027;
ak) CDR H1-3 of SEQ ID NO: 1006-1008 and CDR L1-3 of SEQ ID NO:1011-1013;
al) CDR H1-3 of SEQ ID NO: 906-908 and CDR L1-3 of SEQ ID NO: 911-913;
am) CDR H1-3 of SEQ ID NO: 992-994 and CDR L1-3 of SEQ ID NO: 997-999;
an) CDR H1-3 of SEQ ID NO: 942-944 and CDR L1-3 of SEQ ID NO: 947-949;
ao) CDR H1-3 of SEQ ID NO: 960-962 and CDR L1-3 of SEQ ID NO: 965-967; and
ap) CDR H1-3 of SEQ ID NO:978-980 and CDR L1-3 of SEQ ID NO: 983-985.

11. The bispecific single chain antibody molecule of claim 10, wherein the binding domains are arranged in the order VH PSMA-VL PSMA-VH CD3-VL CD3 or VL PSMA-VH PSMA-VH CD3-VL CD3.

12. The bispecific single chain antibody molecule according to claim 11, wherein the bispecific single chain antibody molecule comprises a sequence selected from:
(a) an amino acid sequence as depicted in any of SEQ ID NOs: 399, 413, 427, 441, 455, 469, 483, 497, 511, 525, 539, 553, 567, 581, 595, 609, 623, 637, 651, 665, 679, 693, 707, 721, 734, 799, 817, 863, 849, 835, 785, 899, 935, 1017, 1031, 917, 1003, 953, 971 or 989;
(b) an amino acid sequence encoded by a nucleic acid sequence as depicted in any of SEQ ID NOs: 400, 414, 428, 442, 456, 470, 484, 498, 512, 526, 540, 554, 568, 582, 596, 610, 624, 638, 652, 666, 680, 694, 708, 736 735, 800, 818, 864, 850, 836, 786, 882, 900, 936, 1018, 1032, 918, 1004, 954, 972, 990, 804, 822, 868, 886, 904, 940, 922, 958 or 976; and
(c) an amino acid sequence at least 90% identical, more preferred at least 95% identical, most preferred at least 96% identical to the amino acid sequence of (a) or (b).

13. A nucleic acid sequence encoding a bispecific single chain antibody molecule as defined in claim 1.

14. A vector, which comprises a nucleic acid sequence as defined in claim

15. The vector of claim 14, wherein said vector further comprises a regulatory sequence, which is operably linked to said nucleic acid sequence.

16. The vector of claim 15, wherein said vector is an expression vector.

17. A host transformed or transfected with a vector defined in claim 14.

18. A process for the production of a bispecific single chain antibody molecule according to claim 1, said process comprising culturing a host transformed or transfected with a vector comprising a nucleic acid sequence encoding a bispecific single chain antibody molecule as defined in claim 1, under conditions allowing the expression of the bispecific single chain antibody molecule as defined in claim 1 and recovering the produced polypeptide from the culture.

19. A pharmaceutical composition comprising a bispecific single chain antibody molecule according to claim 1

20.-27. (canceled)

28. A method for the prevention, treatment or amelioration of a disease in a subject in the need thereof, said method comprising the step of administration of an effective amount of a pharmaceutical composition of claim 19.

29. The method of claim 28 wherein said disease is cancer.

30. The method of claim 29, wherein said cancer is a solid tumor, preferably a carcinoma or prostate cancer.

31. The method of claim 28, wherein said pharmaceutical composition is administered in combination with an additional drug.

32. The method of claim 31, wherein said drug is a non-proteinaceous compound or a proteinaceous compound.

33. The method of claim 32, wherein said proteinaceous compound or nonproteinaceous compound is administered simultaneously or nonsimultaneously with said pharmaceutical composition.

34. The method of claim 28, wherein said subject is a human.

35. A kit comprising a bispecific single chain antibody molecule as defined in claim 1.

36. The polypeptide as defined in claim 1, wherein the epitope is part of an amino acid sequence comprised in the group consisting of SEQ ID NOs:2, 4, 6 and 8 and comprises at least the amino acid sequence Gln-Asp-Gly-Asn-Glu.

The application's sequence listing, which the Patent Office published only in electronic form, follows.

SEQUENCE LISTING (1049 sequences)

SEQ ID NO: 1 - protein, 105 aa, Homo sapiens
QDGNEEMGGITQTPYKVSISGTTVILTCPQYPGSEILWQHNDKNIGGDEDDKNIGSDEDHLSLKEFSELEQSGYYVCYPRGSKPEDANFYLYLRARVCENCMEMD

SEQ ID NO: 2 - protein, 27 aa, Homo sapiens
QDGNEEMGGITQTPYKVSISGTTVILT

SEQ ID NO: 3 - protein, 96 aa, Callithrix jacchus
QDGNEEMGDTTQNPYKVSISGTTVTLTCPRYDGHEIKWLVNSQNKEGHEDHLLLEDFSEMEQSGYYACLSKETPAEEASHYLYLKARVCENCVEVD

SEQ ID NO: 4 - protein, 27 aa, Callithrix jacchus
QDGNEEMGDTTQNPYKVSISGTTVTLT

SEQ ID NO: 5 - protein, 96 aa, Saguinus oedipus; identical to SEQ ID NO: 3

SEQ ID NO: 6 - protein, 27 aa, Saguinus oedipus
QDGNEEMGDTTQNPYKVSISGTTVTLT

SEQ ID NO: 7 - protein, 96 aa, Saimiri sciureus
QDGNEEIGDTTQNPYKVSISGTTVTLTCPRYDGQEIKWLVNDQNKEGHEDHLLLEDFSEMEQSGYYACLSKETPTEEASHYLYLKARVCENCVEVD

SEQ ID NO: 8 - protein, 27 aa, Saimiri sciureus
QDGNEEIGDTTQNPYKVSISGTTVTLT

SEQ ID NO: 9 - protein, 14 aa, Artificial Sequence
  CDR-L1 of F6A
GSSTGAVTSGYYPN

SEQ ID NO: 10 - protein, 7 aa, Artificial Sequence
  CDR-L2 of F6A
GTKFLAP

SEQ ID NO: 11 - protein, 9 aa, Artificial Sequence
  CDR-L3 of F6A
ALWYSNRWV

SEQ ID NO: 12 - protein, 5 aa, Artificial Sequence
  CDR-H1 of F6A
IYAMN

SEQ ID NO: 13 - protein, 19 aa, Artificial Sequence
  CDR-H2 of F6A
RIRSKYNNYATYYADSVKS

SEQ ID NO: 14 - protein, 14 aa, Artificial Sequence
  CDR-H3 of F6A
HGNFGNSYVSFFAY

SEQ ID NO: 15 - protein, 125 aa, Artificial Sequence
  VH of F6A
EVQLVESGGGLVQPGGSLKLSCAASGFTFNIYAMNWVRQAPGKGLEWVARIRSKYNNYATYYADSVKSRFTISRDDSKNTAYLQMNNLKTEDTAVYYCVRHGNFGNSYVSFFAYWGQGTLVTVSS

SEQ ID NO: 16 - DNA, 375 bp, Artificial Sequence
  VH of F6A
gaggtgcagctggtcgagtctggaggaggattggtgcagcctggagggtcattgaaactctcatgtgcagcctctggattcaccttcaatatctacgccatgaactgggtccgccaggctccaggaaagggtttggaatgggttgctcgcataagaagtaaatataataattatgcaacatattatgccgattcagtgaaaagcaggttcaccatctccagagatgattcaaaaaacactgcctatctacaaatgaacaacttgaaaactgaggacactgccgtgtactactgtgtgagacatgggaacttcggtaatagctacgtatccttcttcgcttactggggccaagggactctggtcaccgtctcctca

SEQ ID NO: 17 - protein, 109 aa, Artificial Sequence
  VL of F6A
QTVVTQEPSLTVSPGGTVTLTCGSSTGAVTSGYYPNWVQQKPGQAPRGLIGGTKFLAPGTPARFSGSLLGGKAALTLSGVQPEDEAEYYCALWYSNRWVFGGGTKLTVL

SEQ ID NO: 18 - DNA, 327 bp, Artificial Sequence
  VL of F6A
cagactgttgtgactcaggaaccttcactcaccgtatcacctggtggaacagtcacactcacttgtggctcctcgactggggctgttacatctggctactacccaaactgggtccaacaaaaaccaggtcaggcaccccgtggtctaataggtgggactaagttcctcgcccccggtactcctgccagattctcaggctccctgcttggaggcaaggctgccctcaccctctcaggggtacagccagaggatgaggcagaatattactgtgctctatggtacagcaaccgctgggtgttcggtggaggaaccaaactgactgtccta

SEQ ID NO: 19 - protein, 125 aa, Artificial Sequence
  VH-P of F6A
EVQLLESGGGLVQPGGSLKLSCAASGFTFNIYAMNWVRQAPGKGLEWVARIRSKYNNYATYYADSVKSRFTISRDDSKNTAYLQMNNLKTEDTAVYYCVRHGNFGNSYVSFFAYWGQGTLVTVSS

SEQ ID NO: 20 - DNA, 375 bp, Artificial Sequence
  VH-P of F6A
gaggtgcagctgctcgagtctggaggaggattggtgcagcctggagggtcattgaaactctcatgtgcagcctctggattcaccttcaatatctacgccatgaactgggtccgccaggctccaggaaagggtttggaatgggttgctcgcataagaagtaaatataataattatgcaacatattatgccgattcagtgaaaagcaggttcaccatctccagagatgattcaaaaaacactgcctatctacaaatgaacaacttgaaaactgaggacactgccgtgtactactgtgtgagacatgggaacttcggtaatagctacgtatccttcttcgcttactggggccaagggactctggtcaccgtctcctca

SEQ ID NO: 21 - protein, 109 aa, Artificial Sequence
  VL-P of F6A
ELVVTQEPSLTVSPGGTVTLTCGSSTGAVTSGYYPNWVQQKPGQAPRGLIGGTKFLAPGTPARFSGSLLGGKAALTLSGVQPEDEAEYYCALWYSNRWVFGGGTKLTVL

SEQ ID NO: 22 - DNA, 327 bp, Artificial Sequence
  VL-P of F6A
gagctcgttgtgactcaggaaccttcactcaccgtatcacctggtggaacagtcacactcacttgtggctcctcgactggggctgttacatctggctactacccaaactgggtccaacaaaaaccaggtcaggcaccccgtggtctaataggtgggactaagttcctcgcccccggtactcctgccagattctcaggctccctgcttggaggcaaggctgccctcaccctctcaggggtacagccagaggatgaggcagaatattactgtgctctatggtacagcaaccgctgggtgttcggtggaggaaccaaactgactgtccta

SEQ ID NO: 23 - protein, 249 aa, Artificial Sequence
  VH-VL of F6A
EVQLVESGGGLVQPGGSLKLSCAASGFTFNIYAMNWVRQAPGKGLEWVARIRSKYNNYATYYADSVKSRFTISRDDSKNTAYLQMNNLKTEDTAVYYCVRHGNFGNSYVSFFAYWGQGTLVTVSSGGGGSGGGGSGGGGSQTVVTQEPSLTVSPGGTVTLTCGSSTGAVTSGYYPNWVQQKPGQAPRGLIGGTKFLAPGTPARFSGSLLGGKAALTLSGVQPEDEAEYYCALWYSNRWVFGGGTKLTVL

SEQ ID NO: 24 - DNA, 747 bp, Artificial Sequence
  VH-VL of F6A
gaggtgcagctggtcgagtctggaggaggattggtgcagcctggagggtcattgaaactctcatgtgcagcctctggattcaccttcaatatctacgccatgaactgggtccgccaggctccaggaaagggtttggaatgggttgctcgcataagaagtaaatataataattatgcaacatattatgccgattcagtgaaaagcaggttcaccatctccagagatgattcaaaaaacactgcctatctacaaatgaacaacttgaaaactgaggacactgccgtgtactactgtgtgagacatgggaacttcggtaatagctacgtatccttcttcgcttactggggccaagggactctggtcaccgtctcctcaggtggtggtggttctggcggcggcggctccggtggtggtggttctcagactgttgtgactcaggaaccttcactcaccgtatcacctggtggaacagtcacactcacttgtggctcctcgactggggctgttacatctggctactacccaaactgggtccaacaaaaaccaggtcaggcaccccgtggtctaataggtgggactaagttcctcgcccccggtactcctgccagattctcaggctccctgcttggaggcaaggctgccctcaccctctcaggggtacagccagaggatgaggcagaatattactgtgctctatggtacagcaaccgctgggtgttcggtggaggaaccaaactgactgtccta

SEQ ID NO: 25 - protein, 249 aa, Artificial Sequence
  VH-VL-P of F6A
EVQLLESGGGLVQPGGSLKLSCAASGFTFNIYAMNWVRQAPGKGLEWVARIRSKYNNYATYYADSVKSRFTISRDDSKNTAYLQMNNLKTEDTAVYYCVRHGNFGNSYVSFFAYWGQGTLVTVSSGGGGSGGGGSGGGGSELVVTQEPSLTVSPGGTVTLTCGSSTGAVTSGYYPNWVQQKPGQAPRGLIGGTKFLAPGTPARFSGSLLGGKAALTLSGVQPEDEAEYYCALWYSNRWVFGGGTKLTVL

SEQ ID NO: 26 - DNA, 747 bp, Artificial Sequence
  VH-VL-P of F6A
gaggtgcagctgctcgagtctggaggaggattggtgcagcctggagggtcattgaaactctcatgtgcagcctctggattcaccttcaatatctacgccatgaactgggtccgccaggctccaggaaagggtttggaatgggttgctcgcataagaagtaaatataataattatgcaacatattatgccgattcagtgaaaagcaggttcaccatctccagagatgattcaaaaaacactgcctatctacaaatgaacaacttgaaaactgaggacactgccgtgtactactgtgtgagacatgggaacttcggtaatagctacgtatccttcttcgcttactggggccaagggactctggtcaccgtctcctcaggtggtggtggttctggcggcggcggctccggtggtggtggttctgagctcgttgtgactcaggaaccttcactcaccgtatcacctggtggaacagtcacactcacttgtggctcctcgactggggctgttacatctggctactacccaaactgggtccaacaaaaaccaggtcaggcaccccgtggtctaataggtgggactaagttcctcgcccccggtactcctgccagattctcaggctccctgcttggaggcaaggctgccctcaccctctcaggggtacagccagaggatgaggcagaatattactgtgctctatggtacagcaaccgctgggtgttcggtggaggaaccaaactgactgtccta

SEQ ID NO: 27 - protein, 14 aa, Artificial Sequence
  CDR-L1 of H2C
GSSTGAVTSGYYPN

SEQ ID NO: 28 - protein, 7 aa, Artificial Sequence
  CDR-L2 of H2C
GTKFLAP

SEQ ID NO: 29 - protein, 9 aa, Artificial Sequence
  CDR-L3 of H2C
ALWYSNRWV

SEQ ID NO: 30 - protein, 5 aa, Artificial Sequence
  CDR-H1 of H2C
KYAMN

SEQ ID NO: 31 - protein, 19 aa, Artificial Sequence
  CDR-H2 of H2C
RIRSKYNNYATYYADSVKD

SEQ ID NO: 32 - protein, 14 aa, Artificial Sequence
  CDR-H3 of H2C
HGNFGNSYISYWAY

SEQ ID NO: 33 - protein, 125 aa, Artificial Sequence
  VH of H2C
EVQLVESGGGLVQPGGSLKLSCAASGFTFNKYAMNWVRQAPGKGLEWVARIRSKYNNYATYYADSVKDRFTISRDDSKNTAYLQMNNLKTEDTAVYYCVRHGNFGNSYISYWAYWGQGTLVTVSS

SEQ ID NO: 34 - DNA, 375 bp, Artificial Sequence
  VH of H2C
gaggtgcagctggtcgagtctggaggaggattggtgcagcctggagggtcattgaaactctcatgtgcagcctctggattcaccttcaataagtacgccatgaactgggtccgccaggctccaggaaagggtttggaatgggttgctcgcataagaagtaaatataataattatgcaacatattatgccgattcagtgaaagacaggttcaccatctccagagatgattcaaaaaacactgcctatctacaaatgaacaacttgaaaactgaggacactgccgtgtactactgtgtgagacatgggaacttcggtaatagctacatatcctactgggcttactggggccaagggactctggtcaccgtctcctca

SEQ ID NO: 35 - protein, 109 aa, Artificial Sequence; identical to SEQ ID NO: 17
  VL of H2C

SEQ ID NO: 36 - DNA, 327 bp, Artificial Sequence; identical to SEQ ID NO: 18
  VL of H2C

SEQ ID NO: 37 - protein, 125 aa, Artificial Sequence
  VH-P of H2C
EVQLLESGGGLVQPGGSLKLSCAASGFTFNKYAMNWVRQAPGKGLEWVARIRSKYNNYATYYADSVKDRFTISRDDSKNTAYLQMNNLKTEDTAVYYCVRHGNFGNSYISYWAYWGQGTLVTVSS

SEQ ID NO: 38 - DNA, 375 bp, Artificial Sequence
  VH-P of H2C
gaggtgcagctgctcgagtctggaggaggattggtgcagcctggagggtcattgaaactctcatgtgcagcctctggattcaccttcaataagtacgccatgaactgggtccgccaggctccaggaaagggtttggaatgggttgctcgcataagaagtaaatataataattatgcaacatattatgccgattcagtgaaagacaggttcaccatctccagagatgattcaaaaaacactgcctatctacaaatgaacaacttgaaaactgaggacactgccgtgtactactgtgtgagacatgggaacttcggtaatagctacatatcctactgggcttactggggccaagggactctggtcaccgtctcctca

SEQ ID NO: 39 - protein, 109 aa, Artificial Sequence; identical to SEQ ID NO: 21
  VL-P of H2C

SEQ ID NO: 40 - DNA, 327 bp, Artificial Sequence; identical to SEQ ID NO: 22
  VL-P of H2C

SEQ ID NO: 41 - protein, 249 aa, Artificial Sequence
  VH-VL of H2C
EVQLVESGGGLVQPGGSLKLSCAASGFTFNKYAMNWVRQAPGKGLEWVARIRSKYNNYATYYADSVKDRFTISRDDSKNTAYLQMNNLKTEDTAVYYCVRHGNFGNSYISYWAYWGQGTLVTVSSGGGGSGGGGSGGGGSQTVVTQEPSLTVSPGGTVTLTCGSSTGAVTSGYYPNWVQQKPGQAPRGLIGGTKFLAPGTPARFSGSLLGGKAALTLSGVQPEDEAEYYCALWYSNRWVFGGGTKLTVL

SEQ ID NO: 42 - DNA, 747 bp, Artificial Sequence
  VH-VL of H2C
gaggtgcagctggtcgagtctggaggaggattggtgcagcctggagggtcattgaaactctcatgtgcagcctctggattcaccttcaataagtacgccatgaactgggtccgccaggctccaggaaagggtttggaatgggttgctcgcataagaagtaaatataataattatgcaacatattatgccgattcagtgaaagacaggttcaccatctccagagatgattcaaaaaacactgcctatctacaaatgaacaacttgaaaactgaggacactgccgtgtactactgtgtgagacatgggaacttcggtaatagctacatatcctactgggcttactggggccaagggactctggtcaccgtctcctcaggtggtggtggttctggcggcggcggctccggtggtggtggttctcagactgttgtgactcaggaaccttcactcaccgtatcacctggtggaacagtcacactcacttgtggctcctcgactggggctgttacatctggctactacccaaactgggtccaacaaaaaccaggtcaggcaccccgtggtctaataggtgggactaagttcctcgcccccggtactcctgccagattctcaggctccctgcttggaggcaaggctgccctcaccctctcaggggtacagccagaggatgaggcagaatattactgtgctctatggtacagcaaccgctgggtgttcggtggaggaaccaaactgactgtccta

SEQ ID NO: 43 - protein, 249 aa, Artificial Sequence
  VH-VL-P of H2C
EVQLLESGGGLVQPGGSLKLSCAASGFTFNKYAMNWVRQAPGKGLEWVARIRSKYNNYATYYADSVKDRFTISRDDSKNTAYLQMNNLKTEDTAVYYCVRHGNFGNSYISYWAYWGQGTLVTVSSGGGGSGGGGSGGGGSELVVTQEPSLTVSPGGTVTLTCGSSTGAVTSGYYPNWVQQKPGQAPRGLIGGTKFLAPGTPARFSGSLLGGKAALTLSGVQPEDEAEYYCALWYSNRWVFGGGTKLTVL

SEQ ID NO: 44 - DNA, 747 bp, Artificial Sequence
  VH-VL-P of H2C
gaggtgcagctgctcgagtctggaggaggattggtgcagcctggagggtcattgaaactctcatgtgcagcctctggattcaccttcaataagtacgccatgaactgggtccgccaggctccaggaaagggtttggaatgggttgctcgcataagaagtaaatataataattatgcaacatattatgccgattcagtgaaagacaggttcaccatctccagagatgattcaaaaaacactgcctatctacaaatgaacaacttgaaaactgaggacactgccgtgtactactgtgtgagacatgggaacttcggtaatagctacatatcctactgggcttactggggccaagggactctggtcaccgtctcctcaggtggtggtggttctggcggcggcggctccggtggtggtggttctgagctcgttgtgactcaggaaccttcactcaccgtatcacctggtggaacagtcacactcacttgtggctcctcgactggggctgttacatctggctactacccaaactgggtccaacaaaaaccaggtcaggcaccccgtggtctaataggtgggactaagttcctcgcccccggtactcctgccagattctcaggctccctgcttggaggcaaggctgccctcaccctctcaggggtacagccagaggatgaggcagaatattactgtgctctatggtacagcaaccgctgggtgttcggtggaggaaccaaactgactgtccta

SEQ ID NO: 45 - protein, 14 aa, Artificial Sequence
  CDR-L1 of H1E
GSSTGAVTSGYYPN

SEQ ID NO: 46 - protein, 7 aa, Artificial Sequence
  CDR-L2 of H1E
GTKFLAP

SEQ ID NO: 47 - protein, 9 aa, Artificial Sequence
  CDR-L3 of H1E
ALWYSNRWV

SEQ ID NO: 48 - protein, 5 aa, Artificial Sequence
  CDR-H1 of H1E
SYAMN

SEQ ID NO: 49 - protein, 19 aa, Artificial Sequence
  CDR-H2 of H1E
RIRSKYNNYATYYADSVKG

SEQ ID NO: 50 - protein, 14 aa, Artificial Sequence
  CDR-H3 of H1E
HGNFGNSYLSFWAY

SEQ ID NO: 51 - protein, 125 aa, Artificial Sequence
  VH of H1E
EVQLVESGGGLEQPGGSLKLSCAASGFTFNSYAMNWVRQAPGKGLEWVARIRSKYNNYATYYADSVKGRFTISRDDSKNTAYLQMNNLKTEDTAVYYCVRHGNFGNSYLSFWAYWGQGTLVTVSS

SEQ ID NO: 52 - DNA, 374 bp, Artificial Sequence
  VH of H1E
gaggtgcagctggtcgagtctggaggaggattggagcagcctggagggtcattgaaactctcatgtgcagcctctggattcaccttcaattcgtacgccatgaactgggtccgccaggctccaggaaagggtttggaatgggttgctcgcataagaagtaaatataataattatgcaacatattatgccgattcagtgaaagggaggttcaccatctccagagatgattcaaaaaacactgcctatctacaaatgaacaacttgaaaactgaggacactgccgtgtactactgtgtgagacatgggaacttcggtaatagctacctatccttctgggcttactggggccaagggactctggtcaccgtctcctc

SEQ ID NO: 53 - protein, 109 aa, Artificial Sequence; identical to SEQ ID NO: 17
  VL of H1E

SEQ ID NO: 54 - DNA, 327 bp, Artificial Sequence; identical to SEQ ID NO: 18
  VL of H1E

SEQ ID NO: 55 - protein, 125 aa, Artificial Sequence
  VH-P of H1E
EVQLLESGGGLEQPGGSLKLSCAASGFTFNSYAMNWVRQAPGKGLEWVARIRSKYNNYATYYADSVKGRFTISRDDSKNTAYLQMNNLKTEDTAVYYCVRHGNFGNSYLSFWAYWGQGTLVTVSS

SEQ ID NO: 56 - DNA, 375 bp, Artificial Sequence
  VH-P of H1E
gaggtgcagctgctcgagtctggaggaggattggagcagcctggagggtcattgaaactctcatgtgcagcctctggattcaccttcaattcgtacgccatgaactgggtccgccaggctccaggaaagggtttggaatgggttgctcgcataagaagtaaatataataattatgcaacatattatgccgattcagtgaaagggaggttcaccatctccagagatgattcaaaaaacactgcctatctacaaatgaacaacttgaaaactgaggacactgccgtgtactactgtgtgagacatgggaacttcggtaatagctacctatccttctgggcttactggggccaagggactctggtcaccgtctcctca

SEQ ID NO: 57 - protein, 109 aa, Artificial Sequence; identical to SEQ ID NO: 21
  VL-P of H1E

SEQ ID NO: 58 - DNA, 327 bp, Artificial Sequence; identical to SEQ ID NO: 22
  VL-P of H1E

SEQ ID NO: 59 - protein, 249 aa, Artificial Sequence
  VH-VL of H1E
EVQLVESGGGLEQPGGSLKLSCAASGFTFNSYAMNWVRQAPGKGLEWVARIRSKYNNYATYYADSVKGRFTISRDDSKNTAYLQMNNLKTEDTAVYYCVRHGNFGNSYLSFWAYWGQGTLVTVSSGGGGSGGGGSGGGGSQTVVTQEPSLTVSPGGTVTLTCGSSTGAVTSGYYPNWVQQKPGQAPRGLIGGTKFLAPGTPARFSGSLLGGKAALTLSGVQPEDEAEYYCALWYSNRWVFGGGTKLTVL

SEQ ID NO: 60 - DNA, 747 bp, Artificial Sequence
  VH-VL of H1E
gaggtgcagctggtcgagtctggaggaggattggagcagcctggagggtcattgaaactctcatgtgcagcctctggattcaccttcaattcgtacgccatgaactgggtccgccaggctccaggaaagggtttggaatgggttgctcgcataagaagtaaatataataattatgcaacatattatgccgattcagtgaaagggaggttcaccatctccagagatgattcaaaaaacactgcctatctacaaatgaacaacttgaaaactgaggacactgccgtgtactactgtgtgagacatgggaacttcggtaatagctacctatccttctgggcttactggggccaagggactctggtcaccgtctcctcaggtggtggtggttctggcggcggcggctccggtggtggtggttctcagactgttgtgactcaggaaccttcactcaccgtatcacctggtggaacagtcacactcacttgtggctcctcgactggggctgttacatctggctactacccaaactgggtccaacaaaaaccaggtcaggcaccccgtggtctaataggtgggactaagttcctcgcccccggtactcctgccagattctcaggctccctgcttggaggcaaggctgccctcaccctctcaggggtacagccagaggatgaggcagaatattactgtgctctatggtacagcaaccgctgggtgttcggtggaggaaccaaactgactgtccta

SEQ ID NO: 61 - protein, 249 aa, Artificial Sequence
  VH-VL-P of H1E
EVQLLESGGGLEQPGGSLKLSCAASGFTFNSYAMNWVRQAPGKGLEWVARIRSKYNNYATYYADSVKGRFTISRDDSKNTAYLQMNNLKTEDTAVYYCVRHGNFGNSYLSFWAYWGQGTLVTVSSGGGGSGGGGSGGGGSELVVTQEPSLTVSPGGTVTLTCGSSTGAVTSGYYPNWVQQKPGQAPRGLIGGTKFLAPGTPARFSGSLLGGKAALTLSGVQPEDEAEYYCALWYSNRWVFGGGTKLTVL

SEQ ID NO: 62 - DNA, 747 bp, Artificial Sequence
  VH-VL-P of H1E
gaggtgcagctgctcgagtctggaggaggattggagcagcctggagggtcattgaaactctcatgtgcagcctctggattcaccttcaattcgtacgccatgaactgggtccgccaggctccaggaaagggtttggaatgggttgctcgcataagaagtaaatataataattatgcaacatattatgccgattcagtgaaagggaggttcaccatctccagagatgattcaaaaaacactgcctatctacaaatgaacaacttgaaaactgaggacactgccgtgtactactgtgtgagacatgggaacttcggtaatagctacctatccttctgggcttactggggccaagggactctggtcaccgtctcctcaggtggtggtggttctggcggcggcggctccggtggtggtggttctgagctcgttgtgactcaggaaccttcactcaccgtatcacctggtggaacagtcacactcacttgtggctcctcgactggggctgttacatctggctactacccaaactgggtccaacaaaaaccaggtcaggcaccccgtggtctaataggtgggactaagttcctcgcccccggtactcctgccagattctcaggctccctgcttggaggcaaggctgccctcaccctctcaggggtacagccagaggatgaggcagaatattactgtgctctatggtacagcaaccgctgggtgttcggtggaggaaccaaactgactgtccta

SEQ ID NO: 63 - protein, 14 aa, Artificial Sequence
  CDR-L1 of G4H
GSSTGAVTSGYYPN

SEQ ID NO: 64 - protein, 7 aa, Artificial Sequence
  CDR-L2 of G4H
GTKFLAP

SEQ ID NO: 65 - protein, 9 aa, Artificial Sequence
  CDR-L3 of G4H
ALWYSNRWV

SEQ ID NO: 66 - protein, 5 aa, Artificial Sequence
  CDR-H1 of G4H
RYAMN

SEQ ID NO: 67 - protein, 19 aa, Artificial Sequence
  CDR-H2 of G4H
RIRSKYNNYATYYADSVKG

SEQ ID NO: 68 - protein, 14 aa, Artificial Sequence
  CDR-H3 of G4H
HGNFGNSYLSYFAY

SEQ ID NO: 69 - protein, 125 aa, Artificial Sequence
  VH of G4H
EVQLVESGGGLVQPGGSLKLSCAASGFTFNRYAMNWVRQAPGKGLEWVARIRSKYNNYATYYADSVKGRFTISRDDSKNTAYLQMNNLKTEDTAVYYCVRHGNFGNSYLSYFAYWGQGTLVTVSS

SEQ ID NO: 70 - DNA, 375 bp, Artificial Sequence
  VH of G4H
gaggtgcagctggtcgagtctggaggaggattggtgcagcctggagggtcattgaaactctcatgtgcagcctctggattcaccttcaatcgctacgccatgaactgggtccgccaggctccaggaaagggtttggaatgggttgctcgcataagaagtaaatataataattatgcaacatattatgccgattcagtgaaagggaggttcaccatctccagagatgattcaaaaaacactgcctatctacaaatgaacaacttgaaaactgaggacactgccgtgtactactgtgtgagacatgggaacttcggtaatagctacttatcctacttcgcttactggggccaagggactctggtcaccgtctcctca

SEQ ID NO: 71 - protein, 109 aa, Artificial Sequence; identical to SEQ ID NO: 17
  VL of G4H

SEQ ID NO: 72 - DNA, 327 bp, Artificial Sequence; identical to SEQ ID NO: 18
  VL of G4H

SEQ ID NO: 73 - protein, 125 aa, Artificial Sequence
  VH-P of G4H
EVQLLESGGGLVQPGGSLKLSCAASGFTFNRYAMNWVRQAPGKGLEWVARIRSKYNNYATYYADSVKGRFTISRDDSKNTAYLQMNNLKTEDTAVYYCVRHGNFGNSYLSYFAYWGQGTLVTVSS

SEQ ID NO: 74 - DNA, 375 bp, Artificial Sequence
  VH-P of G4H
gaggtgcagctgctcgagtctggaggaggattggtgcagcctggagggtcattgaaactctcatgtgcagcctctggattcaccttcaatcgctacgccatgaactgggtccgccaggctccaggaaagggtttggaatgggttgctcgcataagaagtaaatataataattatgcaacatattatgccgattcagtgaaagggaggttcaccatctccagagatgattcaaaaaacactgcctatctacaaatgaacaacttgaaaactgaggacactgccgtgtactactgtgtgagacatgggaacttcggtaatagctacttatcctacttcgcttactggggccaagggactctggtcaccgtctcctca

SEQ ID NO: 75 - protein, 109 aa, Artificial Sequence; identical to SEQ ID NO: 21
  VL-P of G4H

SEQ ID NO: 76 - DNA, 327 bp, Artificial Sequence; identical to SEQ ID NO: 22
  VL-P of G4H

SEQ ID NO: 77 - protein, 249 aa, Artificial Sequence
  VH-VL of G4H
EVQLVESGGGLVQPGGSLKLSCAASGFTFNRYAMNWVRQAPGKGLEWVARIRSKYNNYATYYADSVKGRFTISRDDSKNTAYLQMNNLKTEDTAVYYCVRHGNFGNSYLSYFAYWGQGTLVTVSSGGGGSGGGGSGGGGSQTVVTQEPSLTVSPGGTVTLTCGSSTGAVTSGYYPNWVQQKPGQAPRGLIGGTKFLAPGTPARFSGSLLGGKAALTLSGVQPEDEAEYYCALWYSNRWVFGGGTKLTVL

SEQ ID NO: 78 - DNA, 747 bp, Artificial Sequence
  VH-VL of G4H
gaggtgcagctggtcgagtctggaggaggattggtgcagcctggagggtcattgaaactctcatgtgcagcctctggattcaccttcaatcgctacgccatgaactgggtccgccaggctccaggaaagggtttggaatgggttgctcgcataagaagtaaatataataattatgcaacatattatgccgattcagtgaaagggaggttcaccatctccagagatgattcaaaaaacactgcctatctacaaatgaacaacttgaaaactgaggacactgccgtgtactactgtgtgagacatgggaacttcggtaatagctacttatcctacttcgcttactggggccaagggactctggtcaccgtctcctcaggtggtggtggttctggcggcggcggctccggtggtggtggttctcagactgttgtgactcaggaaccttcactcaccgtatcacctggtggaacagtcacactcacttgtggctcctcgactggggctgttacatctggctactacccaaactgggtccaacaaaaaccaggtcaggcaccccgtggtctaataggtgggactaagttcctcgcccccggtactcctgccagattctcaggctccctgcttggaggcaaggctgccctcaccctctcaggggtacagccagaggatgaggcagaatattactgtgctctatggtacagcaaccgctgggtgttcggtggaggaaccaaactgactgtccta

SEQ ID NO: 79 - protein, 249 aa, Artificial Sequence
  VH-VL-P of G4H
EVQLLESGGGLVQPGGSLKLSCAASGFTFNRYAMNWVRQAPGKGLEWVARIRSKYNNYATYYADSVKGRFTISRDDSKNTAYLQMNNLKTEDTAVYYCVRHGNFGNSYLSYFAYWGQGTLVTVSSGGGGSGGGGSGGGGSELVVTQEPSLTVSPGGTVTLTCGSSTGAVTSGYYPNWVQQKPGQAPRGLIGGTKFLAPGTPARFSGSLLGGKAALTLSGVQPEDEAEYYCALWYSNRWVFGGGTKLTVL

SEQ ID NO: 80 - DNA, 747 bp, Artificial Sequence
  VH-VL-P of G4H
gaggtgcagctgctcgagtctggaggaggattggtgcagcctggagggtcattgaaactctcatgtgcagcctctggattcaccttcaatcgctacgccatgaactgggtccgccaggctccaggaaagggtttggaatgggttgctcgcataagaagtaaatataataattatgcaacatattatgccgattcagtgaaagggaggttcaccatctccagagatgattcaaaaaacactgcctatctacaaatgaacaacttgaaaactgaggacactgccgtgtactactgtgtgagacatgggaacttcggtaatagctacttatcctacttcgcttactggggccaagggactctggtcaccgtctcctcaggtggtggtggttctggcggcggcggctccggtggtggtggttctgagctcgttgtgactcaggaaccttcactcaccgtatcacctggtggaacagtcacactcacttgtggctcctcgactggggctgttacatctggctactacccaaactgggtccaacaaaaaccaggtcaggcaccccgtggtctaataggtgggactaagttcctcgcccccggtactcctgccagattctcaggctccctgcttggaggcaaggctgccctcaccctctcaggggtacagccagaggatgaggcagaatattactgtgctctatggtacagcaaccgctgggtgttcggtggaggaaccaaactgactgtccta

SEQ ID NO: 81 - protein, 14 aa, Artificial Sequence
  CDR-L1 of A2J
RSSTGAVTSGYYPN

SEQ ID NO: 82 - protein, 7 aa, Artificial Sequence
  CDR-L2 of A2J
ATDMRPS

SEQ ID NO: 83 - protein, 9 aa, Artificial Sequence
  CDR-L3 of A2J
ALWYSNRWV

SEQ ID NO: 84 - protein, 5 aa, Artificial Sequence
  CDR-H1 of A2J
VYAMN

SEQ ID NO: 85 - protein, 19 aa, Artificial Sequence
  CDR-H2 of A2J
RIRSKYNNYATYYADSVKK

SEQ ID NO: 86 - protein, 14 aa, Artificial Sequence
  CDR-H3 of A2J
HGNFGNSYLSWWAY

SEQ ID NO: 87 - protein, 125 aa, Artificial Sequence
  VH of A2J
EVQLVESGGGLVQPGGSLKLSCAASGFTFNVYAMNWVRQAPGKGLEWVARIRSKYNNYATYYADSVKKRFTISRDDSKNTAYLQMNNLKTEDTAVYYCVRHGNFGNSYLSWWAYWGQGTLVTVSS

SEQ ID NO: 88 - DNA, 375 bp, Artificial Sequence
  VH of A2J
gaggtgcagctggtcgagtctggaggaggattggtgcagcctggagggtcattgaaactctcatgtgcagcctctggattcaccttcaatgtctacgccatgaactgggtccgccaggctccaggaaagggtttggaatgggttgctcgcataagaagtaaatataataattatgcaacatattatgccgattcagtgaaaaagaggttcaccatctccagagatgattcaaaaaacactgcctatctacaaatgaacaacttgaaaactgaggacactgccgtgtactactgtgtgagacatgggaacttcggtaatagctacttatcctggtgggcttactggggccaagggactctggtcaccgtctcctca

SEQ ID NO: 89 - protein, 109 aa, Artificial Sequence
  VL of A2J
QTVVTQEPSLTVSPGGTVTLTCRSSTGAVTSGYYPNWVQQKPGQAPRGLIGATDMRPSGTPARFSGSLLGGKAALTLSGVQPEDEAEYYCALWYSNRWVFGGGTKLTVL

SEQ ID NO: 90 - DNA, 327 bp, Artificial Sequence
  VL of A2J
cagactgttgtgactcaggaaccttcactcaccgtatcacctggtggaacagtcacactcacttgtcgctcctcgactggggctgttacatctggctactacccaaactgggtccaacaaaaaccaggtcaggcaccccgtggtctaataggtgccactgacatgaggccctctggtactcctgccagattctcaggctccctgcttggaggcaaggctgccctcaccctctcaggggtacagccagaggatgaggcagaatattactgtgctctatggtacagcaaccgctgggtgttcggtggaggaaccaaactgactgtccta

SEQ ID NO: 91 - protein, 125 aa, Artificial Sequence
  VH-P of A2J
EVQLLESGGGLVQPGGSLKLSCAASGFTFNVYAMNWVRQAPGKGLEWVARIRSKYNNYATYYADSVKKRFTISRDDSKNTAYLQMNNLKTEDTAVYYCVRHGNFGNSYLSWWAYWGQGTLVTVSS

SEQ ID NO: 92 - DNA, 375 bp, Artificial Sequence
  VH-P of A2J
gaggtgcagctgctcgagtctggaggaggattggtgcagcctggagggtcattgaaactctcatgtgcagcctctggattcaccttcaatgtctacgccatgaactgggtccgccaggctccaggaaagggtttggaatgggttgctcgcataagaagtaaatataataattatgcaacatattatgccgattcagtgaaaaagaggttcaccatctccagagatgattcaaaaaacactgcctatctacaaatgaacaacttgaaaactgaggacactgccgtgtactactgtgtgagacatgggaacttcggtaatagctacttatcctggtgggcttactggggccaagggactctggtcaccgtctcctca

SEQ ID NO: 93 - protein, 109 aa, Artificial Sequence
  VL-P of A2J
ELVVTQEPSLTVSPGGTVTLTCRSSTGAVTSGYYPNWVQQKPGQAPRGLIGATDMRPSGTPARFSGSLLGGKAALTLSGVQPEDEAEYYCALWYSNRWVFGGGTKLTVL

SEQ ID NO: 94 - DNA, 327 bp, Artificial Sequence
  VL-P of A2J
gagctcgttgtgactcaggaaccttcactcaccgtatcacctggtggaacagtcacactcacttgtcgctcctcgactggggctgttacatctggctactacccaaactgggtccaacaaaaaccaggtcaggcaccccgtggtctaataggtgccactgacatgaggccctctggtactcctgccagattctcaggctccctgcttggaggcaaggctgccctcaccctctcaggggtacagccagaggatgaggcagaatattactgtgctctatggtacagcaaccgctgggtgttcggtggaggaaccaaactgactgtccta

SEQ ID NO: 95 - protein, 249 aa, Artificial Sequence
  VH-VL of A2J
EVQLVESGGGLVQPGGSLKLSCAASGFTFNVYAMNWVRQAPGKGLEWVARIRSKYNNYATYYADSVKKRFTISRDDSKNTAYLQMNNLKTEDTAVYYCVRHGNFGNSYLSWWAYWGQGTLVTVSSGGGGSGGGGSGGGGSQTVVTQEPSLTVSPGGTVTLTCRSSTGAVTSGYYPNWVQQKPGQAPRGLIGATDMRPSGTPARFSGSLLGGKAALTLSGVQPEDEAEYYCALWYSNRWVFGGGTKLTVL

SEQ ID NO: 96 - DNA, 747 bp, Artificial Sequence
  VH-VL of A2J
gaggtgcagctggtcgagtctggaggaggattggtgcagcctggagggtcattgaaactctcatgtgcagcctctggattcaccttcaatgtctacgccatgaactgggtccgccaggctccaggaaagggtttggaatgggttgctcgcataagaagtaaatataataattatgcaacatattatgccgattcagtgaaaaagaggttcaccatctccagagatgattcaaaaaacactgcctatctacaaatgaacaacttgaaaactgaggacactgccgtgtactactgtgtgagacatgggaacttcggtaatagctacttatcctggtgggcttactggggccaagggactctggtcaccgtctcctcaggtggtggtggttctggcggcggcggctccggtggtggtggttctcagactgttgtgactcaggaaccttcactcaccgtatcacctggtggaacagtcacactcacttgtcgctcctcgactggggctgttacatctggctactacccaaactgggtccaacaaaaaccaggtcaggcaccccgtggtctaataggtgccactgacatgaggccctctggtactcctgccagattctcaggctccctgcttggaggcaaggctgccctcaccctctcaggggtacagccagaggatgaggcagaatattactgtgctctatggtacagcaaccgctgggtgttcggtggaggaaccaaactgactgtccta

SEQ ID NO: 97 - protein, 249 aa, Artificial Sequence
  VH-VL-P of A2J
EVQLLESGGGLVQPGGSLKLSCAASGFTFNVYAMNWVRQAPGKGLEWVARIRSKYNNYATYYADSVKKRFTISRDDSKNTAYLQMNNLKTEDTAVYYCVRHGNFGNSYLSWWAYWGQGTLVTVSSGGGGSGGGGSGGGGSELVVTQEPSLTVSPGGTVTLTCRSSTGAVTSGYYPNWVQQKPGQAPRGLIGATDMRPSGTPARFSGSLLGGKAALTLSGVQPEDEAEYYCALWYSNRWVFGGGTKLTVL

SEQ ID NO: 98 - DNA, 747 bp, Artificial Sequence
  VH-VL-P of A2J
gaggtgcagctgctcgagtctggaggaggattggtgcagcctggagggtcattgaaactctcatgtgcagcctctggattcaccttcaatgtctacgccatgaactgggtccgccaggctccaggaaagggtttggaatgggttgctcgcataagaagtaaatataataattatgcaacatattatgccgattcagtgaaaaagaggttcaccatctccagagatgattcaaaaaacactgcctatctacaaatgaacaacttgaaaactgaggacactgccgtgtactactgtgtgagacatgggaacttcggtaatagctacttatcctggtgggcttactggggccaagggactctggtcaccgtctcctcaggtggtggtggttctggcggcggcggctccggtggtggtggttctgagctcgttgtgactcaggaaccttcactcaccgtatcacctggtggaacagtcacactcacttgtcgctcctcgactggggctgttacatctggctactacccaaactgggtccaacaaaaaccaggtcaggcaccccgtggtctaataggtgccactgacatgaggccctctggtactcctgccagattctcaggctccctgcttggaggcaaggctgccctcaccctctcaggggtacagccagaggatgaggcagaatattactgtgctctatggtacagcaaccgctgggtgttcggtggaggaaccaaactgactgtccta

SEQ ID NO: 99 - protein, 14 aa, Artificial Sequence
  CDR-L1 of E1L
GSSTGAVTSGYYPN

SEQ ID NO: 100 - protein, 7 aa, Artificial Sequence
  CDR-L2 of E1L
GTKFLAP

SEQ ID NO: 101 - protein, 9 aa, Artificial Sequence
  CDR-L3 of E1L
ALWYSNRWV

SEQ ID NO: 102 - protein, 5 aa, Artificial Sequence
  CDR-H1 of E1L
KYAMN

SEQ ID NO: 103 - protein, 19 aa, Artificial Sequence
  CDR-H2 of E1L
RIRSKYNNYATYYADSVKS

SEQ ID NO: 104 - protein, 14 aa, Artificial Sequence
  CDR-H3 of E1L
HGNFGNSYTSYYAY

SEQ ID NO: 105 - protein, 125 aa, Artificial Sequence
  VH of E1L
EVQLVESGGGLVQPGGSLKLSCAASGFTFNKYAMNWVRQAPGKGLEWVARIRSKYNNYATYYADSVKSRFTISRDDSKNTAYLQMNNLKTEDTAVYYCVRHGNFGNSYTSYYAYWGQGTLVTVSS

SEQ ID NO: 106 - DNA, 375 bp, Artificial Sequence
  VH of E1L
gaggtgcagctggtcgagtctggaggaggattggtgcagcctggagggtcattgaaactctcatgtgcagcctctggattcaccttcaataagtacgccatgaactgggtccgccaggctccaggaaagggtttggaatgggttgctcgcataagaagtaaatataataattatgcaacatattatgccgattcagtgaaatcgaggttcaccatctccagagatgattcaaaaaacactgcctatctacaaatgaacaacttgaaaactgaggacactgccgtgtactactgtgtgagacatgggaacttcggtaatagctacacatcctactacgcttactggggccaagggactctggtcaccgtctcctca

SEQ ID NO: 107 - protein, 109 aa, Artificial Sequence; identical to SEQ ID NO: 17
  VL of E1L

SEQ ID NO: 108 - DNA, 327 bp, Artificial Sequence; identical to SEQ ID NO: 18
  VL of E1L

SEQ ID NO: 109 - protein, 125 aa, Artificial Sequence
  VH-P of E1L
EVQLLESGGGLVQPGGSLKLSCAASGFTFNKYAMNWVRQAPGKGLEWVARIRSKYNNYATYYADSVKSRFTISRDDSKNTAYLQMNNLKTEDTAVYYCVRHGNFGNSYTSYYAYWGQGTLVTVSS

SEQ ID NO: 110 - DNA, 375 bp, Artificial Sequence
  VH-P of E1L
gaggtgcagctgctcgagtctggaggaggattggtgcagcctggagggtcattgaaactctcatgtgcagcctctggattcaccttcaataagtacgccatgaactgggtccgccaggctccaggaaagggtttggaatgggttgctcgcataagaagtaaatataataattatgcaacatattatgccgattcagtgaaatcgaggttcaccatctccagagatgattcaaaaaacactgcctatctacaaatgaacaacttgaaaactgaggacactgccgtgtactactgtgtgagacatgggaacttcggtaatagctacacatcctactacgcttactggggccaagggactctggtcaccgtctcctca

SEQ ID NO: 111 - protein, 109 aa, Artificial Sequence; identical to SEQ ID NO: 21
  VL-P of E1L

SEQ ID NO: 112 - DNA, 327 bp, Artificial Sequence; identical to SEQ ID NO: 22
  VL-P of E1L

SEQ ID NO: 113 - protein, 249 aa, Artificial Sequence
  VH-VL of E1L
EVQLVESGGGLVQPGGSLKLSCAASGFTFNKYAMNWVRQAPGKGLEWVARIRSKYNNYATYYADSVKSRFTISRDDSKNTAYLQMNNLKTEDTAVYYCVRHGNFGNSYTSYYAYWGQGTLVTVSSGGGGSGGGGSGGGGSQTVVTQEPSLTVSPGGTVTLTCGSSTGAVTSGYYPNWVQQKPGQAPRGLIGGTKFLAPGTPARFSGSLLGGKAALTLSGVQPEDEAEYYCALWYSNRWVFGGGTKLTVL

SEQ ID NO: 114 - DNA, 747 bp, Artificial Sequence
  VH-VL of E1L
gaggtgcagctggtcgagtctggaggaggattggtgcagcctggagggtcattgaaactctcatgtgcagcctctggattcaccttcaataagtacgccatgaactgggtccgccaggctccaggaaagggtttggaatgggttgctcgcataagaagtaaatataataattatgcaacatattatgccgattcagtgaaatcgaggttcaccatctccagagatgattcaaaaaacactgcctatctacaaatgaacaacttgaaaactgaggacactgccgtgtactactgtgtgagacatgggaacttcggtaatagctacacatcctactacgcttactggggccaagggactctggtcaccgtctcctcaggtggtggtggttctggcggcggcggctccggtggtggtggttctcagactgttgtgactcaggaaccttcactcaccgtatcacctggtggaacagtcacactcacttgtggctcctcgactggggctgttacatctggctactacccaaactgggtccaacaaaaaccaggtcaggcaccccgtggtctaataggtgggactaagttcctcgcccccggtactcctgccagattctcaggctccctgcttggaggcaaggctgccctcaccctctcaggggtacagccagaggatgaggcagaatattactgtgctctatggtacagcaaccgctgggtgttcggtggaggaaccaaactgactgtccta

SEQ ID NO: 115 - protein, 249 aa, Artificial Sequence
  VH-VL-P of E1L
EVQLLESGGGLVQPGGSLKLSCAASGFTFNKYAMNWVRQAPGKGLEWVARIRSKYNNYATYYADSVKSRFTISRDDSKNTAYLQMNNLKTEDTAVYYCVRHGNFGNSYTSYYAYWGQGTLVTVSSGGGGSGGGGSGGGGSELVVTQEPSLTVSPGGTVTLTCGSSTGAVTSGYYPNWVQQKPGQAPRGLIGGTKFLAPGTPARFSGSLLGGKAALTLSGVQPEDEAEYYCALWYSNRWVFGGGTKLTVL

SEQ ID NO: 116 - DNA, 747 bp, Artificial Sequence
  VH-VL-P of E1L
gaggtgcagctgctcgagtctggaggaggattggtgcagcctggagggtcattgaaactctcatgtgcagcctctggattcaccttcaataagtacgccatgaactgggtccgccaggctccaggaaagggtttggaatgggttgctcgcataagaagtaaatataataattatgcaacatattatgccgattcagtgaaatcgaggttcaccatctccagagatgattcaaaaaacactgcctatctacaaatgaacaacttgaaaactgaggacactgccgtgtactactgtgtgagacatgggaacttcggtaatagctacacatcctactacgcttactggggccaagggactctggtcaccgtctcctcaggtggtggtggttctggcggcggcggctccggtggtggtggttctgagctcgttgtgactcaggaaccttcactcaccgtatcacctggtggaacagtcacactcacttgtggctcctcgactggggctgttacatctggctactacccaaactgggtccaacaaaaaccaggtcaggcaccccgtggtctaataggtgggactaagttcctcgcccccggtactcctgccagattctcaggctccctgcttggaggcaaggctgccctcaccctctcaggggtacagccagaggatgaggcagaatattactgtgctctatggtacagcaaccgctgggtgttcggtggaggaaccaaactgactgtccta

SEQ ID NO: 117 - protein, 14 aa, Artificial Sequence
  CDR-L1 of E2M
RSSTGAVTSGYYPN

SEQ ID NO: 118 - protein, 7 aa, Artificial Sequence
  CDR-L2 of E2M
ATDMRPS

SEQ ID NO: 119 - protein, 9 aa, Artificial Sequence
  CDR-L3 of E2M
ALWYSNRWV

SEQ ID NO: 120 - protein, 5 aa, Artificial Sequence
  CDR-H1 of E2M
GYAMN

SEQ ID NO: 121 - protein, 19 aa, Artificial Sequence
  CDR-H2 of E2M
RIRSKYNNYATYYADSVKE

SEQ ID NO: 122 - protein, 14 aa, Artificial Sequence
  CDR-H3 of E2M
HRNFGNSYLSWFAY

SEQ ID NO: 123 - protein, 125 aa, Artificial Sequence
  VH of E2M
EVQLVESGGGLVQPGGSLKLSCAASGFTFNGYAMNWVRQAPGKGLEWVARIRSKYNNYATYYADSVKERFTISRDDSKNTAYLQMNNLKTEDTAVYYCVRHRNFGNSYLSWFAYWGQGTLVTVSS

SEQ ID NO: 124 - DNA, 375 bp, Artificial Sequence
  VH of E2M
gaggtgcagctggtcgagtctggaggaggattggtgcagcctggagggtcattgaaactctcatgtgcagcctctggattcaccttcaatggctacgccatgaactgggtccgccaggctccaggaaagggtttggaatgggttgctcgcataagaagtaaatataataattatgcaacatattatgccgattcagtgaaagagaggttcaccatctccagagatgattcaaaaaacactgcctatctacaaatgaacaacttgaaaactgaggacactgccgtgtactactgtgtgagacataggaacttcggtaatagctacttatcctggttcgcttactggggccaagggactctggtcaccgtctcctca

SEQ ID NO: 125 - protein, 109 aa, Artificial Sequence; identical to SEQ ID NO: 89
  VL of E2M

SEQ ID NO: 126 - DNA, 327 bp, Artificial Sequence; identical to SEQ ID NO: 90
  VL of E2M

SEQ ID NO: 127 - protein, 125 aa, Artificial Sequence
  VH-P of E2M
EVQLLESGGGLVQPGGSLKLSCAASGFTFNGYAMNWVRQAPGKGLEWVARIRSKYNNYATYYADSVKERFTISRDDSKNTAYLQMNNLKTEDTAVYYCVRHRNFGNSYLSWFAYWGQGTLVTVSS

SEQ ID NO: 128 - DNA, 375 bp, Artificial Sequence
  VH-P of E2M
gaggtgcagctgctcgagtctggaggaggattggtgcagcctggagggtcattgaaactctcatgtgcagcctctggattcaccttcaatggctacgccatgaactgggtccgccaggctccaggaaagggtttggaatgggttgctcgcataagaagtaaatataataattatgcaacatattatgccgattcagtgaaagagaggttcaccatctccagagatgattcaaaaaacactgcctatctacaaatgaacaacttgaaaactgaggacactgccgtgtactactgtgtgagacataggaacttcggtaatagctacttatcctggttcgcttactggggccaagggactctggtcaccgtctcctca

SEQ ID NO: 129 - protein, 109 aa, Artificial Sequence; identical to SEQ ID NO: 93
  VL-P of E2M

SEQ ID NO: 130 - DNA, 327 bp, Artificial Sequence; identical to SEQ ID NO: 94
  VL-P of E2M

SEQ ID NO: 131 - protein, 249 aa, Artificial Sequence
  VH-VL of E2M
EVQLVESGGGLVQPGGSLKLSCAASGFTFNGYAMNWVRQAPGKGLEWVARIRSKYNNYATYYADSVKERFTISRDDSKNTAYLQMNNLKTEDTAVYYCVRHRNFGNSYLSWFAYWGQGTLVTVSSGGGGSGGGGSGGGGSQTVVTQEPSLTVSPGGTVTLTCRSSTGAVTSGYYPNWVQQKPGQAPRGLIGATDMRPSGTPARFSGSLLGGKAALTLSGVQPEDEAEYYCALWYSNRWVFGGGTKLTVL

SEQ ID NO: 132 - DNA, 747 bp, Artificial Sequence
  VH-VL of E2M
gaggtgcagctggtcgagtctggaggaggattggtgcagcctggagggtcattgaaactctcatgtgcagcctctggattcaccttcaatggctacgccatgaactgggtccgccaggctccaggaaagggtttggaatgggttgctcgcataagaagtaaatataataattatgcaacatattatgccgattcagtgaaagagaggttcaccatctccagagatgattcaaaaaacactgcctatctacaaatgaacaacttgaaaactgaggacactgccgtgtactactgtgtgagacataggaacttcggtaatagctacttatcctggttcgcttactggggccaagggactctggtcaccgtctcctcaggtggtggtggttctggcggcggcggctccggtggtggtggttctcagactgttgtgactcaggaaccttcactcaccgtatcacctggtggaacagtcacactcacttgtcgctcctcgactggggctgttacatctggctactacccaaactgggtccaacaaaaaccaggtcaggcaccccgtggtctaataggtgccactgacatgaggccctctggtactcctgccagattctcaggctccctgcttggaggcaaggctgccctcaccctctcaggggtacagccagaggatgaggcagaatattactgtgctctatggtacagcaaccgctgggtgttcggtggaggaaccaaactgactgtccta

SEQ ID NO: 133 - protein, 249 aa, Artificial Sequence
  VH-VL-P of E2M
EVQLLESGGGLVQPGGSLKLSCAASGFTFNGYAMNWVRQAPGKGLEWVARIRSKYNNYATYYADSVKERFTISRDDSKNTAYLQMNNLKTEDTAVYYCVRHRNFGNSYLSWFAYWGQGTLVTVSSGGGGSGGGGSGGGGSELVVTQEPSLTVSPGGTVTLTCRSSTGAVTSGYYPNWVQQKPGQAPRGLIGATDMRPSGTPARFSGSLLGGKAALTLSGVQPEDEAEYYCALWYSNRWVFGGGTKLTVL

SEQ ID NO: 134 - DNA, 747 bp, Artificial Sequence
  VH-VL-P of E2M
gaggtgcagctgctcgagtctggaggaggattggtgcagcctggagggtcattgaaactctcatgtgcagcctctggattcaccttcaatggctacgccatgaactgggtccgccaggctccaggaaagggtttggaatgggttgctcgcataagaagtaaatataataattatgcaacatattatgccgattcagtgaaagagaggttcaccatctccagagatgattcaaaaaacactgcctatctacaaatgaacaacttgaaaactgaggacactgccgtgtactactgtgtgagacataggaacttcggtaatagctacttatcctggttcgcttactggggccaagggactctggtcaccgtctcctcaggtggtggtggttctggcggcggcggctccggtggtggtggttctgagctcgttgtgactcaggaaccttcactcaccgtatcacctggtggaacagtcacactcacttgtcgctcctcgactggggctgttacatctggctactacccaaactgggtccaacaaaaaccaggtcaggcaccccgtggtctaataggtgccactgacatgaggccctctggtactcctgccagattctcaggctccctgcttggaggcaaggctgccctcaccctctcaggggtacagccagaggatgaggcagaatattactgtgctctatggtacagcaaccgctgggtgttcggtggaggaaccaaactgactgtccta

SEQ ID NO: 135 - protein, 14 aa, Artificial Sequence
  CDR-L1 of F7O
GSSTGAVTSGYYPN

SEQ ID NO: 136 - protein, 7 aa, Artificial Sequence
  CDR-L2 of F7O
GTKFLAP

SEQ ID NO: 137 - protein, 9 aa, Artificial Sequence
  CDR-L3 of F7O
ALWYSNRWV

SEQ ID NO: 138 - protein, 5 aa, Artificial Sequence
  CDR-H1 of F7O
VYAMN

SEQ ID NO: 139 - protein, 19 aa, Artificial Sequence
  CDR-H2 of F7O
RIRSKYNNYATYYADSVKK

SEQ ID NO: 140 - protein, 14 aa, Artificial Sequence
  CDR-H3 of F7O
HGNFGNSYISWWAY

SEQ ID NO: 141 - protein, 125 aa, Artificial Sequence
  VH of F7O
EVQLVESGGGLVQPGGSLKLSCAASGFTFNVYAMNWVRQAPGKGLEWVARIRSKYNNYATYYADSVKKRFTISRDDSKNTAYLQMNNLKTEDTAVYYCVRHGNFGNSYISWWAYWGQGTLVTVSS

SEQ ID NO: 142 - DNA, 375 bp, Artificial Sequence
  VH of F7O
gaggtgcagctggtcgagtctggaggaggattggtgcagcctggagggtcattgaaactctcatgtgcagcctctggattcaccttcaatgtgtacgccatgaactgggtccgccaggctccaggaaagggtttggaatgggttgctcgcataagaagtaaatataataattatgcaacatattatgccgattcagtgaaaaagaggttcaccatctccagagatgattcaaaaaacactgcctatctacaaatgaacaacttgaaaactgaggacactgccgtgtactactgtgtgagacatgggaacttcggtaatagctacatatcctggtgggcttactggggccaagggactctggtcaccgtctcctca

SEQ ID NO: 143 - protein, 109 aa, Artificial Sequence; identical to SEQ ID NO: 17
  VL of F7O

SEQ ID NO: 144 - DNA, 327 bp, Artificial Sequence; identical to SEQ ID NO: 18
  VL of F7O

SEQ ID NO: 145 - protein, 125 aa, Artificial Sequence
  VH-P of F7O
EVQLLESGGGLVQPGGSLKLSCAASGFTFNVYAMNWVRQAPGKGLEWVARIRSKYNNYATYYADSVKKRFTISRDDSKNTAYLQMNNLKTEDTAVYYCVRHGNFGNSYISWWAYWGQGTLVTVSS

SEQ ID NO: 146 - DNA, 375 bp, Artificial Sequence
  VH-P of F7O
gaggtgcagctgctcgagtctggaggaggattggtgcagcctggagggtcattgaaactctcatgtgcagcctctggattcaccttcaatgtgtacgccatgaactgggtccgccaggctccaggaaagggtttggaatgggttgctcgcataagaagtaaatataataattatgcaacatattatgccgattcagtgaaaaagaggttcaccatctccagagatgattcaaaaaacactgcctatctacaaatgaacaacttgaaaactgaggacactgccgtgtactactgtgtgagacatgggaacttcggtaatagctacatatcctggtgggcttactggggccaagggactctggtcaccgtctcctca

SEQ ID NO: 147 - protein, 109 aa, Artificial Sequence; identical to SEQ ID NO: 21
  VL-P of F7O

SEQ ID NO: 148 - DNA, 327 bp, Artificial Sequence; identical to SEQ ID NO: 22
  VL-P of F7O

SEQ ID NO: 149 - protein, 249 aa, Artificial Sequence
  VH-VL of F7O
EVQLVESGGGLVQPGGSLKLSCAASGFTFNVYAMNWVRQAPGKGLEWVARIRSKYNNYATYYADSVKKRFTISRDDSKNTAYLQMNNLKTEDTAVYYCVRHGNFGNSYISWWAYWGQGTLVTVSSGGGGSGGGGSGGGGSQTVVTQEPSLTVSPGGTVTLTCGSSTGAVTSGYYPNWVQQKPGQAPRGLIGGTKFLAPGTPARFSGSLLGGKAALTLSGVQPEDEAEYYCALWYSNRWVFGGGTKLTVL

SEQ ID NO: 150 - DNA, 747 bp, Artificial Sequence
  VH-VL of F7O
gaggtgcagctggtcgagtctggaggaggattggtgcagcctggagggtcattgaaactctcatgtgcagcctctggattcaccttcaatgtgtacgccatgaactgggtccgccaggctccaggaaagggtttggaatgggttgctcgcataagaagtaaatataataattatgcaacatattatgccgattcagtgaaaaagaggttcaccatctccagagatgattcaaaaaacactgcctatctacaaatgaacaacttgaaaactgaggacactgccgtgtactactgtgtgagacatgggaacttcggtaatagctacatatcctggtgggcttactggggccaagggactctggtcaccgtctcctcaggtggtggtggttctggcggcggcggctccggtggtggtggttctcagactgttgtgactcaggaaccttcactcaccgtatcacctggtggaacagtcacactcacttgtggctcctcgactggggctgttacatctggctactacccaaactgggtccaacaaaaaccaggtcaggcaccccgtggtctaataggtgggactaagttcctcgcccccggtactcctgccagattctcaggctccctgcttggaggcaaggctgccctcaccctctcaggggtacagccagaggatgaggcagaatattactgtgctctatggtacagcaaccgctgggtgttcggtggaggaaccaaactgactgtccta

SEQ ID NO: 151 - protein, 249 aa, Artificial Sequence
  VH-VL-P of F7O
EVQLLESGGGLVQPGGSLKLSCAASGFTFNVYAMNWVRQAPGKGLEWVARIRSKYNNYATYYADSVKKRFTISRDDSKNTAYLQMNNLKTEDTAVYYCVRHGNFGNSYISWWAYWGQGTLVTVSSGGGGSGGGGSGGGGSELVVTQEPSLTVSPGGTVTLTCGSSTGAVTSGYYPNWVQQKPGQAPRGLIGGTKFLAPGTPARFSGSLLGGKAALTLSGVQPEDEAEYYCALWYSNRWVFGGGTKLTVL

SEQ ID NO: 152 - DNA, 747 bp, Artificial Sequence
  VH-VL-P of F7O
gaggtgcagctgctcgagtctggaggaggattggtgcagcctggagggtcattgaaactctcatgtgcagcctctggattcaccttcaatgtgtacgccatgaactgggtccgccaggctccaggaaagggtttggaatgggttgctcgcataagaagtaaatataataattatgcaacatattatgccgattcagtgaaaaagaggttcaccatctccagagatgattcaaaaaacactgcctatctacaaatgaacaacttgaaaactgaggacactgccgtgtactactgtgtgagacatgggaacttcggtaatagctacatatcctggtgggcttactggggccaagggactctggtcaccgtctcctcaggtggtggtggttctggcggcggcggctccggtggtggtggttctgagctcgttgtgactcaggaaccttcactcaccgtatcacctggtggaacagtcacactcacttgtggctcctcgactggggctgttacatctggctactacccaaactgggtccaacaaaaaccaggtcaggcaccccgtggtctaataggtgggactaagttcctcgcccccggtactcctgccagattctcaggctccctgcttggaggcaaggctgccctcaccctctcaggggtacagccagaggatgaggcagaatattactgtgctctatggtacagcaaccgctgggtgttcggtggaggaaccaaactgactgtccta

SEQ ID NO: 153 - protein, 14 aa, Artificial Sequence
  CDR-L1 of F12Q
GSSTGAVTSGNYPN

SEQ ID NO: 154 - protein, 7 aa, Artificial Sequence
  CDR-L2 of F12Q
GTKFLAP

SEQ ID NO: 155 - protein, 9 aa, Artificial Sequence
  CDR-L3 of F12Q
VLWYSNRWV

SEQ ID NO: 156 - protein, 5 aa, Artificial Sequence
  CDR-H1 of F12Q
SYAMN

SEQ ID NO: 157 - protein, 19 aa, Artificial Sequence
  CDR-H2 of F12Q
RIRSKYNNYATYYADSVKG

SEQ ID NO: 158 - protein, 14 aa, Artificial Sequence
  CDR-H3 of F12Q
HGNFGNSYVSWWAY

SEQ ID NO: 159 - protein, 125 aa, Artificial Sequence
  VH of F12Q
EVQLVESGGGLVQPGGSLKLSCAASGFTFNSYAMNWVRQAPGKGLEWVARIRSKYNNYATYYADSVKGRFTISRDDSKNTAYLQMNNLKTEDTAVYYCVRHGNFGNSYVSWWAYWGQGTLVTVSS

SEQ ID NO: 160 - DNA, 375 bp, Artificial Sequence
  VH of F12Q
gaggtgcagctggtcgagtctggaggaggattggtgcagcctggagggtcattgaaactctcatgtgcagcctctggattcaccttcaatagctacgccatgaactgggtccgccaggctccaggaaagggtttggaatgggttgctcgcataagaagtaaatataataattatgcaacatattatgccgattcagtgaaaggcaggttcaccatctccagagatgattcaaaaaacactgcctatctacaaatgaacaacttgaaaactgaggacactgccgtgtactactgtgtgagacatgggaacttcggtaatagctacgtttcctggtgggcttactggggccaagggactctggtcaccgtctcctca

SEQ ID NO: 161 - protein, 109 aa, Artificial Sequence
  VL of F12Q
QTVVTQEPSLTVSPGGTVTLTCGSSTGAVTSGNYPNWVQQKPGQAPRGLIGGTKFLAPGTPARFSGSLLGGKAALTLSGVQPEDEAEYYCVLWYSNRWVFGGGTKLTVL

SEQ ID NO: 162 - DNA, 327 bp, Artificial Sequence
  VL of F12Q
cagactgttgtgactcaggaaccttcactcaccgtatcacctggtggaacagtcacactcacttgtggctcctcgactggggctgttacatctggcaactacccaaactgggtccaacaaaaaccaggtcaggcaccccgtggtctaataggtgggactaagttcctcgcccccggtactcctgccagattctcaggctccctgcttggaggcaaggctgccctcaccctctcaggggtacagccagaggatgaggcagaatattactgtgttctatggtacagcaaccgctgggtgttcggtggaggaaccaaactgactgtccta

SEQ ID NO: 163 - protein, 125 aa, Artificial Sequence
  VH-P of F12Q
EVQLLESGGGLVQPGGSLKLSCAASGFTFNSYAMNWVRQAPGKGLEWVARIRSKYNNYATYYADSVKGRFTISRDDSKNTAYLQMNNLKTEDTAVYYCVRHGNFGNSYVSWWAYWGQGTLVTVSS

SEQ ID NO: 164 - DNA, 375 bp, Artificial Sequence
  VH-P of F12Q
gaggtgcagctgctcgagtctggaggaggattggtgcagcctggagggtcattgaaactctcatgtgcagcctctggattcaccttcaatagctacgccatgaactgggtccgccaggctccaggaaagggtttggaatgggttgctcgcataagaagtaaatataataattatgcaacatattatgccgattcagtgaaaggcaggttcaccatctccagagatgattcaaaaaacactgcctatctacaaatgaacaacttgaaaactgaggacactgccgtgtactactgtgtgagacatgggaacttcggtaatagctacgtttcctggtgggcttactggggccaagggactctggtcaccgtctcctca

SEQ ID NO: 165 - protein, 109 aa, Artificial Sequence
  VL-P of F12Q
ELVVTQEPSLTVSPGGTVTLTCGSSTGAVTSGNYPNWVQQKPGQAPRGLIGGTKFLAPGTPARFSGSLLGGKAALTLSGVQPEDEAEYYCVLWYSNRWVFGGGTKLTVL

SEQ ID NO: 166 - DNA, 327 bp, Artificial Sequence
  VL-P of F12Q
gagctcgttgtgactcaggaaccttcactcaccgtatcacctggtggaacagtcacactcacttgtggctcctcgactggggctgttacatctggcaactacccaaactgggtccaacaaaaaccaggtcaggcaccccgtggtctaataggtgggactaagttcctcgcccccggtactcctgccagattctcaggctccctgcttggaggcaaggctgccctcaccctctcaggggtacagccagaggatgaggcagaatattactgtgttctatggtacagcaaccgctgggtgttcggtggaggaaccaaactgactgtccta

SEQ ID NO: 167 - protein, 249 aa, Artificial Sequence
  VH-VL of F12Q
EVQLVESGGGLVQPGGSLKLSCAASGFTFNSYAMNWVRQAPGKGLEWVARIRSKYNNYATYYADSVKGRFTISRDDSKNTAYLQMNNLKTEDTAVYYCVRHGNFGNSYVSWWAYWGQGTLVTVSSGGGGSGGGGSGGGGSQTVVTQEPSLTVSPGGTVTLTCGSSTGAVTSGNYPNWVQQKPGQAPRGLIGGTKFLAPGTPARFSGSLLGGKAALTLSGVQPEDEAEYYCVLWYSNRWVFGGGTKLTVL

SEQ ID NO: 168 - DNA, 747 bp, Artificial Sequence
  VH-VL of F12Q
gaggtgcagctggtcgagtctggaggaggattggtgcagcctggagggtcattgaaactctcatgtgcagcctctggattcaccttcaatagctacgccatgaactgggtccgccaggctccaggaaagggtttggaatgggttgctcgcataagaagtaaatataataattatgcaacatattatgccgattcagtgaaaggcaggttcaccatctccagagatgattcaaaaaacactgcctatctacaaatgaacaacttgaaaactgaggacactgccgtgtactactgtgtgagacatgggaacttcggtaatagctacgtttcctggtgggcttactggggccaagggactctggtcaccgtctcctcaggtggtggtggttctggcggcggcggctccggtggtggtggttctcagactgttgtgactcaggaaccttcactcaccgtatcacctggtggaacagtcacactcacttgtggctcctcgactggggctgttacatctggcaactacccaaactgggtccaacaaaaaccaggtcaggcaccccgtggtctaataggtgggactaagttcctcgcccccggtactcctgccagattctcaggctccctgcttggaggcaaggctgccctcaccctctcaggggtacagccagaggatgaggcagaatattactgtgttctatggtacagcaaccgctgggtgttcggtggaggaaccaaactgactgtccta

SEQ ID NO: 169 - protein, 249 aa, Artificial Sequence
  VH-VL-P of F12Q
EVQLLESGGGLVQPGGSLKLSCAASGFTFNSYAMNWVRQAPGKGLEWVARIRSKYNNYATYYADSVKGRFTISRDDSKNTAYLQMNNLKTEDTAVYYCVRHGNFGNSYVSWWAYWGQGTLVTVSSGGGGSGGGGSGGGGSELVVTQEPSLTVSPGGTVTLTCGSSTGAVTSGNYPNWVQQKPGQAPRGLIGGTKFLAPGTPARFSGSLLGGKAALTLSGVQPEDEAEYYCVLWYSNRWVFGGGTKLTVL

SEQ ID NO: 170 - DNA, 747 bp, Artificial Sequence
  VH-VL-P of F12Q
gaggtgcagctgctcgagtctggaggaggattggtgcagcctggagggtcattgaaactctcatgtgcagcctctggattcaccttcaatagctacgccatgaactgggtccgccaggctccaggaaagggtttggaatgggttgctcgcataagaagtaaatataataattatgcaacatattatgccgattcagtgaaaggcaggttcaccatctccagagatgattcaaaaaacactgcctatctacaaatgaacaacttgaaaactgaggacactgccgtgtactactgtgtgagacatgggaacttcggtaatagctacgtttcctggtgggcttactggggccaagggactctggtcaccgtctcctcaggtggtggtggttctggcggcggcggctccggtggtggtggttctgagctcgttgtgactcaggaaccttcactcaccgtatcacctggtggaacagtcacactcacttgtggctcctcgactggggctgttacatctggcaactacccaaactgggtccaacaaaaaccaggtcaggcaccccgtggtctaataggtgggactaagttcctcgcccccggtactcctgccagattctcaggctccctgcttggaggcaaggctgccctcaccctctcaggggtacagccagaggatgaggcagaatattactgtgttctatggtacagcaaccgctgggtgttcggtggaggaaccaaactgactgtccta

SEQ ID NO: 171 - protein, 14 aa, Artificial Sequence
  CDR-L1 of I2C
GSSTGAVTSGNYPN

SEQ ID NO: 172 - protein, 7 aa, Artificial Sequence
  CDR-L2 of I2C
GTKFLAP

SEQ ID NO: 173 - protein, 9 aa, Artificial Sequence
  CDR-L3 of I2C
VLWYSNRWV

SEQ ID NO: 174 - protein, 5 aa, Artificial Sequence
  CDR-H1 of I2C
KYAMN

SEQ ID NO: 175 - protein, 19 aa, Artificial Sequence
  CDR-H2 of I2C
RIRSKYNNYATYYADSVKD

SEQ ID NO: 176 - protein, 14 aa, Artificial Sequence
  CDR-H3 of I2C
HGNFGNSYISYWAY

SEQ ID NO: 177 - protein, 125 aa, Artificial Sequence; identical to SEQ ID NO: 33
  VH of I2C

SEQ ID NO: 178 - DNA, 375 bp, Artificial Sequence; identical to SEQ ID NO: 34
  VH of I2C

SEQ ID NO: 179 - protein, 109 aa, Artificial Sequence; identical to SEQ ID NO: 161
  VL of I2C

SEQ ID NO: 180 - DNA, 327 bp, Artificial Sequence; identical to SEQ ID NO: 162
  VL of I2C

SEQ ID NO: 181 - protein, 125 aa, Artificial Sequence; identical to SEQ ID NO: 37
  VH-P of I2C

SEQ ID NO: 182 - DNA, 375 bp, Artificial Sequence; identical to SEQ ID NO: 38
  VH-P of I2C

SEQ ID NO: 183 - protein, 109 aa, Artificial Sequence; identical to SEQ ID NO: 165
  VL-P of I2C

SEQ ID NO: 184 - DNA, 327 bp, Artificial Sequence; identical to SEQ ID NO: 166
  VL-P of I2C

SEQ ID NO: 185 - protein, 249 aa, Artificial Sequence
  VH-VL of I2C
EVQLVESGGGLVQPGGSLKLSCAASGFTFNKYAMNWVRQAPGKGLEWVARIRSKYNNYATYYADSVKDRFTISRDDSKNTAYLQMNNLKTEDTAVYYCVRHGNFGNSYISYWAYWGQGTLVTVSSGGGGSGGGGSGGGGSQTVVTQEPSLTVSPGGTVTLTCGSSTGAVTSGNYPNWVQQKPGQAPRGLIGGTKFLAPGTPARFSGSLLGGKAALTLSGVQPEDEAEYYCVLWYSNRWVFGGGTKLTVL

SEQ ID NO: 186 - DNA, 747 bp, Artificial Sequence
  VH-VL of I2C
gaggtgcagctggtcgagtctggaggaggattggtgcagcctggagggtcattgaaactctcatgtgcagcctctggattcaccttcaataagtacgccatgaactgggtccgccaggctccaggaaagggtttggaatgggttgctcgcataagaagtaaatataataattatgcaacatattatgccgattcagtgaaagacaggttcaccatctccagagatgattcaaaaaacactgcctatctacaaatgaacaacttgaaaactgaggacactgccgtgtactactgtgtgagacatgggaacttcggtaatagctacatatcctactgggcttactggggccaagggactctggtcaccgtctcctcaggtggtggtggttctggcggcggcggctccggtggtggtggttctcagactgttgtgactcaggaaccttcactcaccgtatcacctggtggaacagtcacactcacttgtggctcctcgactggggctgttacatctggcaactacccaaactgggtccaacaaaaaccaggtcaggcaccccgtggtctaataggtgggactaagttcctcgcccccggtactcctgccagattctcaggctccctgcttggaggcaaggctgccctcaccctctcaggggtacagccagaggatgaggcagaatattactgtgttctatggtacagcaaccgctgggtgttcggtggaggaaccaaactgactgtccta

SEQ ID NO: 187 - protein, 249 aa, Artificial Sequence
  VH-VL-P of I2C
EVQLLESGGGLVQPGGSLKLSCAASGFTFNKYAMNWVRQAPGKGLEWVARIRSKYNNYATYYADSVKDRFTISRDDSKNTAYLQMNNLKTEDTAVYYCVRHGNFGNSYISYWAYWGQGTLVTVSSGGGGSGGGGSGGGGSELVVTQEPSLTVSPGGTVTLTCGSSTGAVTSGNYPNWVQQKPGQAPRGLIGGTKFLAPGTPARFSGSLLGGKAALTLSGVQPEDEAEYYCVLWYSNRWVFGGGTKLTVL

SEQ ID NO: 188 - DNA, 747 bp, Artificial Sequence
  VH-VL-P of I2C
gaggtgcagctgctcgagtctggaggaggattggtgcagcctggagggtcattgaaactctcatgtgcagcctctggattcaccttcaataagtacgccatgaactgggtccgccaggctccaggaaagggtttggaatgggttgctcgcataagaagtaaatataataattatgcaacatattatgccgattcagtgaaagacaggttcaccatctccagagatgattcaaaaaacactgcctatctacaaatgaacaacttgaaaactgaggacactgccgtgtactactgtgtgagacatgggaacttcggtaatagctacatatcctactgggcttactggggccaagggactctggtcaccgtctcctcaggtggtggtggttctggcggcggcggctccggtggtggtggttctgagctcgttgtgactcaggaaccttcactcaccgtatcacctggtggaacagtcacactcacttgtggctcctcgactggggctgttacatctggcaactacccaaactgggtccaacaaaaaccaggtcaggcaccccgtggtctaataggtgggactaagttcctcgcccccggtactcctgccagattctcaggctccctgcttggaggcaaggctgccctcaccctctcaggggtacagccagaggatgaggcagaatattactgtgttctatggtacagcaaccgctgggtgttcggtggaggaaccaaactgactgtccta

SEQ ID NO: 189 - protein, 500 aa, Artificial Sequence
  MCSP-G4 VH-VL x H2C VH-VL
QVQLVQSGAEVKRPGASMKVSCKASGYTFTNYYIHWVRQAPGQGLEWMGWINPNSGATNYAQKFQGRVTMTRDTSTSTVYMELSSLRSEDTAVYYCAKSWVSWFASWGQGTLVTVSSGGGGSGGGGSGGGGSDIVMTQSPDSLAVSLGERATINCKSSQSVLNSSNNRNYLAWYQQKPGQPPKLLIYWASTRESGVPDRFSGSGSGTDFTLTISGLQAEDVAVYYCQQHYSTPFTFGPGTKVDIKSGGGGSEVQLVESGGGLVQPGGSLKLSCAASGFTFNKYAMNWVRQAPGKGLEWVARIRSKYNNYATYYADSVKDRFTISRDDSKNTAYLQMNNLKTEDTAVYYCVRHGNFGNSYISYWAYWGQGTLVTVSSGGGGSGGGGSGGGGSQTVVTQEPSLTVSPGGTVTLTCGSSTGAVTSGYYPNWVQQKPGQAPRGLIGGTKFLAPGTPARFSGSLLGGKAALTLSGVQPEDEAEYYCALWYSNRWVFGGGTKLTVL

SEQ ID NO: 190 - DNA, 1500 bp, Artificial Sequence
  MCSP-G4 VH-VL x H2C VH-VL
caggtgcagctggtccagtctggggctgaggtgaagaggcctggggcctcaatgaaggtctcctgcaaggcttctgggtacaccttcaccaactactatatacactgggtgcgacaggcccctggacaaggtcttgagtggatgggttggatcaaccctaacagtggtgccacaaactatgcacagaagttccagggcagagtcaccatgaccagggacacgtccacgagcacagtctacatggagctgagcagcctgagatctgaggacacggccgtgtattactgtgcgaaatcctgggtctcctggtttgcttcctggggtcaaggaaccttggtcaccgtctcctcaggtggtggtggttctggcggcggcggctccggtggtggtggttctgatatcgtgatgacccagtctccagactccctggctgtgtctctgggcgagagggccaccatcaactgcaagtccagccagagtgttttaaacagctccaacaataggaactacttagcttggtaccagcagaaaccaggacagcctcctaagctgctcatttactgggcatctacccgggaatccggggtccctgaccgattcagtggcagcgggtctgggacagatttcactctcaccatcagtggcctgcaggctgaagatgtggcagtttattactgtcagcaacattatagtactccattcacttttggccctgggaccaaagtggatatcaaatccggaggtggtggatccgaggtgcagctggtcgagtctggaggaggattggtgcagcctggagggtcattgaaactctcatgtgcagcctctggattcaccttcaataagtacgccatgaactgggtccgccaggctccaggaaagggtttggaatgggttgctcgcataagaagtaaatataataattatgcaacatattatgccgattcagtgaaagacaggttcaccatctccagagatgattcaaaaaacactgcctatctacaaatgaacaacttgaaaactgaggacactgccgtgtactactgtgtgagacatgggaacttcggtaatagctacatatcctactgggcttactggggccaagggactctggtcaccgtctcctcaggtggtggtggttctggcggcggcggctccggtggtggtggttctcagactgttgtgactcaggaaccttcactcaccgtatcacctggtggaacagtcacactcacttgtggctcctcgactggggctgttacatctggctactacccaaactgggtccaacaaaaaccaggtcaggcaccccgtggtctaataggtgggactaagttcctcgcccccggtactcctgccagattctcaggctccctgcttggaggcaaggctgccctcaccctctcaggggtacagccagaggatgaggcagaatattactgtgctctatggtacagcaaccgctgggtgttcggtggaggaaccaaactgactgtccta

SEQ ID NO: 191 - protein, 500 aa, Artificial Sequence
  MCSP-G4 VH-VL x F12Q VH-VL
QVQLVQSGAEVKRPGASMKVSCKASGYTFTNYYIHWVRQAPGQGLEWMGWINPNSGATNYAQKFQGRVTMTRDTSTSTVYMELSSLRSEDTAVYYCAKSWVSWFASWGQGTLVTVSSGGGGSGGGGSGGGGSDIVMTQSPDSLAVSLGERATINCKSSQSVLNSSNNRNYLAWYQQKPGQPPKLLIYWASTRESGVPDRFSGSGSGTDFTLTISGLQAEDVAVYYCQQHYSTPFTFGPGTKVDIKSGGGGSEVQLVESGGGLVQPGGSLKLSCAASGFTFNSYAMNWVRQAPGKGLEWVARIRSKYNNYATYYADSVKGRFTISRDDSKNTAYLQMNNLKTEDTAVYYCVRHGNFGNSYVSWWAYWGQGTLVTVSSGGGGSGGGGSGGGGSQTVVTQEPSLTVSPGGTVTLTCGSSTGAVTSGNYPNWVQQKPGQAPRGLIGGTKFLAPGTPARFSGSLLGGKAALTLSGVQPEDEAEYYCVLWYSNRWVFGGGTKLTVL

SEQ ID NO: 192 - DNA, 1500 bp, Artificial Sequence
  MCSP-G4 VH-VL x F12Q VH-VL
caggtgcagctggtccagtctggggctgaggtgaagaggcctggggcctcaatgaaggtctcctgcaaggcttctgggtacaccttcaccaactactatatacactgggtgcgacaggcccctggacaaggtcttgagtggatgggttggatcaaccctaacagtggtgccacaaactatgcacagaagttccagggcagagtcaccatgaccagggacacgtccacgagcacagtctacatggagctgagcagcctgagatctgaggacacggccgtgtattactgtgcgaaatcctgggtctcctggtttgcttcctggggtcaaggaaccttggtcaccgtctcctcaggtggtggtggttctggcggcggcggctccggtggtggtggttctgatatcgtgatgacccagtctccagactccctggctgtgtctctgggcgagagggccaccatcaactgcaagtccagccagagtgttttaaacagctccaacaataggaactacttagcttggtaccagcagaaaccaggacagcctcctaagctgctcatttactgggcatctacccgggaatccggggtccctgaccgattcagtggcagcgggtctgggacagatttcactctcaccatcagtggcctgcaggctgaagatgtggcagtttattactgtcagcaacattatagtactccattcacttttggccctgggaccaaagtggatatcaaatccggaggtggtggatccgaggtgcagctggtcgagtctggaggaggattggtgcagcctggagggtcattgaaactctcatgtgcagcctctggattcaccttcaatagctacgccatgaactgggtccgccaggctccaggaaagggtttggaatgggttgctcgcataagaagtaaatataataattatgcaacatattatgccgattcagtgaaaggcaggttcaccatctccagagatgattcaaaaaacactgcctatctacaaatgaacaacttgaaaactgaggacactgccgtgtactactgtgtgagacatgggaacttcggtaatagctacgtttcctggtgggcttactggggccaagggactctggtcaccgtctcctcaggtggtggtggttctggcggcggcggctccggtggtggtggttctcagactgttgtgactcaggaaccttcactcaccgtatcacctggtggaacagtcacactcacttgtggctcctcgactggggctgttacatctggcaactacccaaactgggtccaacaaaaaccaggtcaggcaccccgtggtctaataggtgggactaagttcctcgcccccggtactcctgccagattctcaggctccctgcttggaggcaaggctgccctcaccctctcaggggtacagccagaggatgaggcagaatattactgtgttctatggtacagcaaccgctgggtgttcggtggaggaaccaaactgactgtccta

SEQ ID NO: 193 - protein, 500 aa, Artificial Sequence
  MCSP-G4 VH-VL-P x F6A VH-VL-P
QVQLVQSGAEVKRPGASMKVSCKASGYTFTNYYIHWVRQAPGQGLEWMGWINPNSGATNYAQKFQGRVTMTRDTSTSTVYMELSSLRSEDTAVYYCAKSWVSWFASWGQGTLVTVSSGGGGSGGGGSGGGGSDIVMTQSPDSLAVSLGERATINCKSSQSVLNSSNNRNYLAWYQQKPGQPPKLLIYWASTRESGVPDRFSGSGSGTDFTLTISGLQAEDVAVYYCQQHYSTPFTFGPGTKVDIKSGGGGSEVQLVESGGGLVQPGGSLKLSCAASGFTFNKYAMNWVRQAPGKGLEWVARIRSKYNNYATYYADSVKDRFTISRDDSKNTAYLQMNNLKTEDTAVYYCVRHGNFGNSYISYWAYWGQGTLVTVSSGGGGSGGGGSGGGGSQTVVTQEPSLTVSPGGTVTLTCGSSTGAVTSGNYPNWVQQKPGQAPRGLIGGTKFLAPGTPARFSGSLLGGKAALTLSGVQPEDEAEYYCVLWYSNRWVFGGGTKLTVL

SEQ ID NO: 194 - DNA, 1500 bp, Artificial Sequence
  MCSP-G4 VH-VL-P x F6A VH-VL-P
caggtgcagctggtccagtctggggctgaggtgaagaggcctggggcctcaatgaaggtctcctgcaaggcttctgggtacaccttcaccaactactatatacactgggtgcgacaggcccctggacaaggtcttgagtggatgggttggatcaaccctaacagtggtgccacaaactatgcacagaagttccagggcagagtcaccatgaccagggacacgtccacgagcacagtctacatggagctgagcagcctgagatctgaggacacggccgtgtattactgtgcgaaatcctgggtctcctggtttgcttcctggggtcaaggaaccttggtcaccgtctcctcaggtggtggtggttctggcggcggcggctccggtggtggtggttctgatatcgtgatgacccagtctccagactccctggctgtgtctctgggcgagagggccaccatcaactgcaagtccagccagagtgttttaaacagctccaacaataggaactacttagcttggtaccagcagaaaccaggacagcctcctaagctgctcatttactgggcatctacccgggaatccggggtccctgaccgattcagtggcagcgggtctgggacagatttcactctcaccatcagtggcctgcaggctgaagatgtggcagtttattactgtcagcaacattatagtactccattcacttttggccctgggaccaaagtggatatcaaatccggaggtggtggatccgaggtgcagctggtcgagtctggaggaggattggtgcagcctggagggtcattgaaactctcatgtgcagcctctggattcaccttcaataagtacgccatgaactgggtccgccaggctccaggaaagggtttggaatgggttgctcgcataagaagtaaatataataattatgcaacatattatgccgattcagtgaaagacaggttcaccatctccagagatgattcaaaaaacactgcctatctacaaatgaacaacttgaaaactgaggacactgccgtgtactactgtgtgagacatgggaacttcggtaatagctacatatcctactgggcttactggggccaagggactctggtcaccgtctcctcaggtggtggtggttctggcggcggcggctccggtggtggtggttctcagactgttgtgactcaggaaccttcactcaccgtatcacctggtggaacagtcacactcacttgtggctcctcgactggggctgttacatctggcaactacccaaactgggtccaacaaaaaccaggtcaggcaccccgtggtctaataggtgggactaagttcctcgcccccggtactcctgccagattctcaggctccctgcttggaggcaaggctgccctcaccctctcaggggtacagccagaggatgaggcagaatattactgtgttctatggtacagcaaccgctgggtgttcggtggaggaaccaaactgactgtccta

SEQ ID NO: 195 - protein, 500 aa, Artificial Sequence
  MCSP-G4 VH-VL-P x F6A VH-VL-P
QVQLVQSGAEVKRPGASMKVSCKASGYTFTNYYIHWVRQAPGQGLEWMGWINPNSGATNYAQKFQGRVTMTRDTSTSTVYMELSSLRSEDTAVYYCAKSWVSWFASWGQGTLVTVSSGGGGSGGGGSGGGGSELVMTQSPDSLAVSLGERATINCKSSQSVLNSSNNRNYLAWYQQKPGQPPKLLIYWASTRESGVPDRFSGSGSGTDFTLTISGLQAEDVAVYYCQQHYSTPFTFGPGTKVDIKSGGGGSEVQLLESGGGLVQPGGSLKLSCAASGFTFNIYAMNWVRQAPGKGLEWVARIRSKYNNYATYYADSVKSRFTISRDDSKNTAYLQMNNLKTEDTAVYYCVRHGNFGNSYVSFFAYWGQGTLVTVSSGGGGSGGGGSGGGGSELVVTQEPSLTVSPGGTVTLTCGSSTGAVTSGYYPNWVQQKPGQAPRGLIGGTKFLAPGTPARFSGSLLGGKAALTLSGVQPEDEAEYYCALWYSNRWVFGGGTKLTVL

SEQ ID NO: 196 - DNA, 1500 bp, Artificial Sequence
  MCSP-G4 VH-VL-P x F6A VH-VL-P
caggtgcagctggtccagtctggggctgaggtgaagaggcctggggcctcaatgaaggtctcctgcaaggcttctgggtacaccttcaccaactactatatacactgggtgcgacaggcccctggacaaggtcttgagtggatgggttggatcaaccctaacagtggtgccacaaactatgcacagaagttccagggcagagtcaccatgaccagggacacgtccacgagcacagtctacatggagctgagcagcctgagatctgaggacacggccgtgtattactgtgcgaaatcctgggtctcctggtttgcttcctggggtcaaggaaccttggtcaccgtctcctcaggtggtggtggttctggcggcggcggctccggtggtggtggttctgagctcgtgatgacccagtctccagactccctggctgtgtctctgggcgagagggccaccatcaactgcaagtccagccagagtgttttaaacagctccaacaataggaactacttagcttggtaccagcagaaaccaggacagcctcctaagctgctcatttactgggcatctacccgggaatccggggtccctgaccgattcagtggcagcgggtctgggacagatttcactctcaccatcagtggcctgcaggctgaagatgtggcagtttattactgtcagcaacattatagtactccattcacttttggccctgggaccaaagtggatatcaaatccggaggtggtggatccgaggtgcagctgctcgagtctggaggaggattggtgcagcctggagggtcattgaaactctcatgtgcagcctctggattcaccttcaatatctacgccatgaactgggtccgccaggctccaggaaagggtttggaatgggttgctcgcataagaagtaaatataataattatgcaacatattatgccgattcagtgaaaagcaggttcaccatctccagagatgattcaaaaaacactgcctatctacaaatgaacaacttgaaaactgaggacactgccgtgtactactgtgtgagacatgggaacttcggtaatagctacgtatccttcttcgcttactggggccaagggactctggtcaccgtctcctcaggtggtggtggttctggcggcggcggctccggtggtggtggttctgagctcgttgtgactcaggaaccttcactcaccgtatcacctggtggaacagtcacactcacttgtggctcctcgactggggctgttacatctggctactacccaaactgggtccaacaaaaaccaggtcaggcaccccgtggtctaataggtgggactaagttcctcgcccccggtactcctgccagattctcaggctccctgcttggaggcaaggctgccctcaccctctcaggggtacagccagaggatgaggcagaatattactgtgctctatggtacagcaaccgctgggtgttcggtggaggaaccaaactgactgtccta

SEQ ID NO: 197 - protein, 500 aa, Artificial Sequence
  MCSP-G4 VH-VL-P x H2C VH-VL-P
QVQLVQSGAEVKRPGASMKVSCKASGYTFTNYYIHWVRQAPGQGLEWMGWINPNSGATNYAQKFQGRVTMTRDTSTSTVYMELSSLRSEDTAVYYCAKSWVSWFASWGQGTLVTVSSGGGGSGGGGSGGGGSELVMTQSPDSLAVSLGERATINCKSSQSVLNSSNNRNYLAWYQQKPGQPPKLLIYWASTRESGVPDRFSGSGSGTDFTLTISGLQAEDVAVYYCQQHYSTPFTFGPGTKVDIKSGGGGSEVQLLESGGGLVQPGGSLKLSCAASGFTFNKYAMNWVRQAPGKGLEWVARIRSKYNNYATYYADSVKDRFTISRDDSKNTAYLQMNNLKTEDTAVYYCVRHGNFGNSYISYWAYWGQGTLVTVSSGGGGSGGGGSGGGGSELVVTQEPSLTVSPGGTVTLTCGSSTGAVTSGYYPNWVQQKPGQAPRGLIGGTKFLAPGTPARFSGSLLGGKAALTLSGVQPEDEAEYYCALWYSNRWVFGGGTKLTVL

SEQ ID NO: 198 - DNA, 1500 bp, Artificial Sequence
  MCSP-G4 VH-VL-P x H2C VH-VL-P
caggtgcagctggtccagtctggggctgaggtgaagaggcctggggcctcaatgaaggtctcctgcaaggcttctgggtacaccttcaccaactactatatacactgggtgcgacaggcccctggacaaggtcttgagtggatgggttggatcaaccctaacagtggtgccacaaactatgcacagaagttccagggcagagtcaccatgaccagggacacgtccacgagcacagtctacatggagctgagcagcctgagatctgaggacacggccgtgtattactgtgcgaaatcctgggtctcctggtttgcttcctggggtcaaggaaccttggtcaccgtctcctcaggtggtggtggttctggcggcggcggctccggtggtggtggttctgagctcgtgatgacccagtctccagactccctggctgtgtctctgggcgagagggccaccatcaactgcaagtccagccagagtgttttaaacagctccaacaataggaactacttagcttggtaccagcagaaaccaggacagcctcctaagctgctcatttactgggcatctacccgggaatccggggtccctgaccgattcagtggcagcgggtctgggacagatttcactctcaccatcagtggcctgcaggctgaagatgtggcagtttattactgtcagcaacattatagtactccattcacttttggccctgggaccaaagtggatatcaaatccggaggtggtggatccgaggtgcagctgctcgagtctggaggaggattggtgcagcctggagggtcattgaaactctcatgtgcagcctctggattcaccttcaataagtacgccatgaactgggtccgccaggctccaggaaagggtttggaatgggttgctcgcataagaagtaaatataataattatgcaacatattatgccgattcagtgaaagacaggttcaccatctccagagatgattcaaaaaacactgcctatctacaaatgaacaacttgaaaactgaggacactgccgtgtactactgtgtgagacatgggaacttcggtaatagctacatatcctactgggcttactggggccaagggactctggtcaccgtctcctcaggtggtggtggttctggcggcggcggctccggtggtggtggttctgagctcgttgtgactcaggaaccttcactcaccgtatcacctggtggaacagtcacactcacttgtggctcctcgactggggctgttacatctggctactacccaaactgggtccaacaaaaaccaggtcaggcaccccgtggtctaataggtgggactaagttcctcgcccccggtactcctgccagattctcaggctccctgcttggaggcaaggctgccctcaccctctcaggggtacagccagaggatgaggcagaatattactgtgctctatggtacagcaaccgctgggtgttcggtggaggaaccaaactgactgtccta

SEQ ID NO: 199 - protein, 500 aa, Artificial Sequence
  MCSP-G4 VH-VL-P x H1E VH-VL-P
QVQLVQSGAEVKRPGASMKVSCKASGYTFTNYYIHWVRQAPGQGLEWMGWINPNSGATNYAQKFQGRVTMTRDTSTSTVYMELSSLRSEDTAVYYCAKSWVSWFASWGQGTLVTVSSGGGGSGGGGSGGGGSELVMTQSPDSLAVSLGERATINCKSSQSVLNSSNNRNYLAWYQQKPGQPPKLLIYWASTRESGVPDRFSGSGSGTDFTLTISGLQAEDVAVYYCQQHYSTPFTFGPGTKVDIKSGGGGSEVQLLESGGGLEQPGGSLKLSCAASGFTFNSYAMNWVRQAPGKGLEWVARIRSKYNNYATYYADSVKGRFTISRDDSKNTAYLQMNNLKTEDTAVYYCVRHGNFGNSYLSFWAYWGQGTLVTVSSGGGGSGGGGSGGGGSELVVTQEPSLTVSPGGTVTLTCGSSTGAVTSGYYPNWVQQKPGQAPRGLIGGTKFLAPGTPARFSGSLLGGKAALTLSGVQPEDEAEYYCALWYSNRWVFGGGTKLTVL

SEQ ID NO: 200 - DNA, 1500 bp, Artificial Sequence
  MCSP-G4 VH-VL-P x H1E VH-VL-P
caggtgcagctggtccagtctggggctgaggtgaagaggcctggggcctcaatgaaggtctcctgcaaggcttctgggtacaccttcaccaactactatatacactgggtgcgacaggcccctggacaaggtcttgagtggatgggttggatcaaccctaacagtggtgccacaaactatgcacagaagttccagggcagagtcaccatgaccagggacacgtccacgagcacagtctacatggagctgagcagcctgagatctgaggacacggccgtgtattactgtgcgaaatcctgggtctcctggtttgcttcctggggtcaaggaaccttggtcaccgtctcctcaggtggtggtggttctggcggcggcggctccggtggtggtggttctgagctcgtgatgacccagtctccagactccctggctgtgtctctgggcgagagggccaccatcaactgcaagtccagccagagtgttttaaacagctccaacaataggaactacttagcttggtaccagcagaaaccaggacagcctcctaagctgctcatttactgggcatctacccgggaatccggggtccctgaccgattcagtggcagcgggtctgggacagatttcactctcaccatcagtggcctgcaggctgaagatgtggcagtttattactgtcagcaacattatagtactccattcacttttggccctgggaccaaagtggatatcaaatccggaggtggtggatccgaggtgcagctgctcgagtctggaggaggattggagcagcctggagggtcattgaaactctcatgtgcagcctctggattcaccttcaattcgtacgccatgaactgggtccgccaggctccaggaaagggtttggaatgggttgctcgcataagaagtaaatataataattatgcaacatattatgccgattcagtgaaagggaggttcaccatctccagagatgattcaaaaaacactgcctatctacaaatgaacaacttgaaaactgaggacactgccgtgtactactgtgtgagacatgggaacttcggtaatagctacctatccttctgggcttactggggccaagggactctggtcaccgtctcctcaggtggtggtggttctggcggcggcggctccggtggtggtggttctgagctcgttgtgactcaggaaccttcactcaccgtatcacctggtggaacagtcacactcacttgtggctcctcgactggggctgttacatctggctactacccaaactgggtccaacaaaaaccaggtcaggcaccccgtggtctaataggtgggactaagttcctcgcccccggtactcctgccagattctcaggctccctgcttggaggcaaggctgccctcaccctctcaggggtacagccagaggatgaggcagaatattactgtgctctatggtacagcaaccgctgggtgttcggtggaggaaccaaactgactgtccta

SEQ ID NO: 201 - protein, 500 aa, Artificial Sequence
  MCSP-G4 VH-VL-P x G4H VH-VL-P
QVQLVQSGAEVKRPGASMKVSCKASGYTFTNYYIHWVRQAPGQGLEWMGWINPNSGATNYAQKFQGRVTMTRDTSTSTVYMELSSLRSEDTAVYYCAKSWVSWFASWGQGTLVTVSSGGGGSGGGGSGGGGSELVMTQSPDSLAVSLGERATINCKSSQSVLNSSNNRNYLAWYQQKPGQPPKLLIYWASTRESGVPDRFSGSGSGTDFTLTISGLQAEDVAVYYCQQHYSTPFTFGPGTKVDIKSGGGGSEVQLLESGGGLVQPGGSLKLSCAASGFTFNRYAMNWVRQAPGKGLEWVARIRSKYNNYATYYADSVKGRFTISRDDSKNTAYLQMNNLKTEDTAVYYCVRHGNFGNSYLSYFAYWGQGTLVTVSSGGGGSGGGGSGGGGSELVVTQEPSLTVSPGGTVTLTCGSSTGAVTSGYYPNWVQQKPGQAPRGLIGGTKFLAPGTPARFSGSLLGGKAALTLSGVQPEDEAEYYCALWYSNRWVFGGGTKLTVL

SEQ ID NO: 202 - DNA, 1500 bp, Artificial Sequence
  MCSP-G4 VH-VL-P x G4H VH-VL-P
caggtgcagctggtccagtctggggctgaggtgaagaggcctggggcctcaatgaaggtctcctgcaaggcttctgggtacaccttcaccaactactatatacactgggtgcgacaggcccctggacaaggtcttgagtggatgggttggatcaaccctaacagtggtgccacaaactatgcacagaagttccagggcagagtcaccatgaccagggacacgtccacgagcacagtctacatggagctgagcagcctgagatctgaggacacggccgtgtattactgtgcgaaatcctgggtctcctggtttgcttcctggggtcaaggaaccttggtcaccgtctcctcaggtggtggtggttctggcggcggcggctccggtggtggtggttctgagctcgtgatgacccagtctccagactccctggctgtgtctctgggcgagagggccaccatcaactgcaagtccagccagagtgttttaaacagctccaacaataggaactacttagcttggtaccagcagaaaccaggacagcctcctaagctgctcatttactgggcatctacccgggaatccggggtccctgaccgattcagtggcagcgggtctgggacagatttcactctcaccatcagtggcctgcaggctgaagatgtggcagtttattactgtcagcaacattatagtactccattcacttttggccctgggaccaaagtggatatcaaatccggaggtggtggatccgaggtgcagctgctcgagtctggaggaggattggtgcagcctggagggtcattgaaactctcatgtgcagcctctggattcaccttcaatcgctacgccatgaactgggtccgccaggctccaggaaagggtttggaatgggttgctcgcataagaagtaaatataataattatgcaacatattatgccgattcagtgaaagggaggttcaccatctccagagatgattcaaaaaacactgcctatctacaaatgaacaacttgaaaactgaggacactgccgtgtactactgtgtgagacatgggaacttcggtaatagctacttatcctacttcgcttactggggccaagggactctggtcaccgtctcctcaggtggtggtggttctggcggcggcggctccggtggtggtggttctgagctcgttgtgactcaggaaccttcactcaccgtatcacctggtggaacagtcacactcacttgtggctcctcgactggggctgttacatctggctactacccaaactgggtccaacaaaaaccaggtcaggcaccccgtggtctaataggtgggactaagttcctcgcccccggtactcctgccagattctcaggctccctgcttggaggcaaggctgccctcaccctctcaggggtacagccagaggatgaggcagaatattactgtgctctatggtacagcaaccgctgggtgttcggtggaggaaccaaactgactgtccta

SEQ ID NO: 203 - protein, 500 aa, Artificial Sequence
  MCSP-G4 VH-VL-P x A2J VH-VL-P
QVQLVQSGAEVKRPGASMKVSCKASGYTFTNYYIHWVRQAPGQGLEWMGWINPNSGATNYAQKFQGRVTMTRDTSTSTVYMELSSLRSEDTAVYYCAKSWVSWFASWGQGTLVTVSSGGGGSGGGGSGGGGSELVMTQSPDSLAVSLGERATINCKSSQSVLNSSNNRNYLAWYQQKPGQPPKLLIYWASTRESGVPDRFSGSGSGTDFTLTISGLQAEDVAVYYCQQHYSTPFTFGPGTKVDIKSGGGGSEVQLLESGGGLVQPGGSLKLSCAASGFTFNVYAMNWVRQAPGKGLEWVARIRSKYNNYATYYADSVKKRFTISRDDSKNTAYLQMNNLKTEDTAVYYCVRHGNFGNSYLSWWAYWGQGTLVTVSSGGGGSGGGGSGGGGSELVVTQEPSLTVSPGGTVTLTCRSSTGAVTSGYYPNWVQQKPGQAPRGLIGATDMRPSGTPARFSGSLLGGKAALTLSGVQPEDEAEYYCALWYSNRWVFGGGTKLTVL

SEQ ID NO: 204 - DNA, 1500 bp, Artificial Sequence
  MCSP-G4 VH-VL-P x A2J VH-VL-P
caggtgcagctggtccagtctggggctgaggtgaagaggcctggggcctcaatgaaggtctcctgcaaggcttctgggtacaccttcaccaactactatatacactgggtgcgacaggcccctggacaaggtcttgagtggatgggttggatcaaccctaacagtggtgccacaaactatgcacagaagttccagggcagagtcaccatgaccagggacacgtccacgagcacagtctacatggagctgagcagcctgagatctgaggacacggccgtgtattactgtgcgaaatcctgggtctcctggtttgcttcctggggtcaaggaaccttggtcaccgtctcctcaggtggtggtggttctggcggcggcggctccggtggtggtggttctgagctcgtgatgacccagtctccagactccctggctgtgtctctgggcgagagggccaccatcaactgcaagtccagccagagtgttttaaacagctccaacaataggaactacttagcttggtaccagcagaaaccaggacagcctcctaagctgctcatttactgggcatctacccgggaatccggggtccctgaccgattcagtggcagcgggtctgggacagatttcactctcaccatcagtggcctgcaggctgaagatgtggcagtttattactgtcagcaacattatagtactccattcacttttggccctgggaccaaagtggatatcaaatccggaggtggtggatccgaggtgcagctgctcgagtctggaggaggattggtgcagcctggagggtcattgaaactctcatgtgcagcctctggattcaccttcaatgtctacgccatgaactgggtccgccaggctccaggaaagggtttggaatgggttgctcgcataagaagtaaatataataattatgcaacatattatgccgattcagtgaaaaagaggttcaccatctccagagatgattcaaaaaacactgcctatctacaaatgaacaacttgaaaactgaggacactgccgtgtactactgtgtgagacatgggaacttcggtaatagctacttatcctggtgggcttactggggccaagggactctggtcaccgtctcctcaggtggtggtggttctggcggcggcggctccggtggtggtggttctgagctcgttgtgactcaggaaccttcactcaccgtatcacctggtggaacagtcacactcacttgtcgctcctcgactggggctgttacatctggctactacccaaactgggtccaacaaaaaccaggtcaggcaccccgtggtctaataggtgccactgacatgaggccctctggtactcctgccagattctcaggctccctgcttggaggcaaggctgccctcaccctctcaggggtacagccagaggatgaggcagaatattactgtgctctatggtacagcaaccgctgggtgttcggtggaggaaccaaactgactgtccta

SEQ ID NO: 205 - protein, 500 aa, Artificial Sequence
  MCSP-G4 VH-VL-P x E1L VH-VL-P
QVQLVQSGAEVKRPGASMKVSCKASGYTFTNYYIHWVRQAPGQGLEWMGWINPNSGATNYAQKFQGRVTMTRDTSTSTVYMELSSLRSEDTAVYYCAKSWVSWFASWGQGTLVTVSSGGGGSGGGGSGGGGSELVMTQSPDSLAVSLGERATINCKSSQSVLNSSNNRNYLAWYQQKPGQPPKLLIYWASTRESGVPDRFSGSGSGTDFTLTISGLQAEDVAVYYCQQHYSTPFTFGPGTKVDIKSGGGGSEVQLLESGGGLVQPGGSLKLSCAASGFTFNKYAMNWVRQAPGKGLEWVARIRSKYNNYATYYADSVKSRFTISRDDSKNTAYLQMNNLKTEDTAVYYCVRHGNFGNSYTSYYAYWGQGTLVTVSSGGGGSGGGGSGGGGSELVVTQEPSLTVSPGGTVTLTCGSSTGAVTSGYYPNWVQQKPGQAPRGLIGGTKFLAPGTPARFSGSLLGGKAALTLSGVQPEDEAEYYCALWYSNRWVFGGGTKLTVL

SEQ ID NO: 206 - DNA, 1500 bp, Artificial Sequence
  MCSP-G4 VH-VL-P x E1L VH-VL-P
caggtgcagctggtccagtctggggctgaggtgaagaggcctggggcctcaatgaaggtctcctgcaaggcttctgggtacaccttcaccaactactatatacactgggtgcgacaggcccctggacaaggtcttgagtggatgggttggatcaaccctaacagtggtgccacaaactatgcacagaagttccagggcagagtcaccatgaccagggacacgtccacgagcacagtctacatggagctgagcagcctgagatctgaggacacggccgtgtattactgtgcgaaatcctgggtctcctggtttgcttcctggggtcaaggaaccttggtcaccgtctcctcaggtggtggtggttctggcggcggcggctccggtggtggtggttctgagctcgtgatgacccagtctccagactccctggctgtgtctctgggcgagagggccaccatcaactgcaagtccagccagagtgttttaaacagctccaacaataggaactacttagcttggtaccagcagaaaccaggacagcctcctaagctgctcatttactgggcatctacccgggaatccggggtccctgaccgattcagtggcagcgggtctgggacagatttcactctcaccatcagtggcctgcaggctgaagatgtggcagtttattactgtcagcaacattatagtactccattcacttttggccctgggaccaaagtggatatcaaatccggaggtggtggatccgaggtgcagctgctcgagtctggaggaggattggtgcagcctggagggtcattgaaactctcatgtgcagcctctggattcaccttcaataagtacgccatgaactgggtccgccaggctccaggaaagggtttggaatgggttgctcgcataagaagtaaatataataattatgcaacatattatgccgattcagtgaaatcgaggttcaccatctccagagatgattcaaaaaacactgcctatctacaaatgaacaacttgaaaactgaggacactgccgtgtactactgtgtgagacatgggaacttcggtaatagctacacatcctactacgcttactggggccaagggactctggtcaccgtctcctcaggtggtggtggttctggcggcggcggctccggtggtggtggttctgagctcgttgtgactcaggaaccttcactcaccgtatcacctggtggaacagtcacactcacttgtggctcctcgactggggctgttacatctggctactacccaaactgggtccaacaaaaaccaggtcaggcaccccgtggtctaataggtgggactaagttcctcgcccccggtactcctgccagattctcaggctccctgcttggaggcaaggctgccctcaccctctcaggggtacagccagaggatgaggcagaatattactgtgctctatggtacagcaaccgctgggtgttcggtggaggaaccaaactgactgtccta

SEQ ID NO: 207 - protein, 500 aa, Artificial Sequence
  MCSP-G4 VH-VL-P x E2M VH-VL-P
QVQLVQSGAEVKRPGASMKVSCKASGYTFTNYYIHWVRQAPGQGLEWMGWINPNSGATNYAQKFQGRVTMTRDTSTSTVYMELSSLRSEDTAVYYCAKSWVSWFASWGQGTLVTVSSGGGGSGGGGSGGGGSELVMTQSPDSLAVSLGERATINCKSSQSVLNSSNNRNYLAWYQQKPGQPPKLLIYWASTRESGVPDRFSGSGSGTDFTLTISGLQAEDVAVYYCQQHYSTPFTFGPGTKVDIKSGGGGSEVQLLESGGGLVQPGGSLKLSCAASGFTFNGYAMNWVRQAPGKGLEWVARIRSKYNNYATYYADSVKERFTISRDDSKNTAYLQMNNLKTEDTAVYYCVRHRNFGNSYLSWFAYWGQGTLVTVSSGGGGSGGGGSGGGGSELVVTQEPSLTVSPGGTVTLTCRSSTGAVTSGYYPNWVQQKPGQAPRGLIGATDMRPSGTPARFSGSLLGGKAALTLSGVQPEDEAEYYCALWYSNRWVFGGGTKLTVL

SEQ ID NO: 208 - DNA, 1500 bp, Artificial Sequence
  MCSP-G4 VH-VL-P x E2M VH-VL-P
caggtgcagctggtccagtctggggctgaggtgaagaggcctggggcctcaatgaaggtctcctgcaaggcttctgggtacaccttcaccaactactatatacactgggtgcgacaggcccctggacaaggtcttgagtggatgggttggatcaaccctaacagtggtgccacaaactatgcacagaagttccagggcagagtcaccatgaccagggacacgtccacgagcacagtctacatggagctgagcagcctgagatctgaggacacggccgtgtattactgtgcgaaatcctgggtctcctggtttgcttcctggggtcaaggaaccttggtcaccgtctcctcaggtggtggtggttctggcggcggcggctccggtggtggtggttctgagctcgtgatgacccagtctccagactccctggctgtgtctctgggcgagagggccaccatcaactgcaagtccagccagagtgttttaaacagctccaacaataggaactacttagcttggtaccagcagaaaccaggacagcctcctaagctgctcatttactgggcatctacccgggaatccggggtccctgaccgattcagtggcagcgggtctgggacagatttcactctcaccatcagtggcctgcaggctgaagatgtggcagtttattactgtcagcaacattatagtactccattcacttttggccctgggaccaaagtggatatcaaatccggaggtggtggatccgaggtgcagctgctcgagtctggaggaggattggtgcagcctggagggtcattgaaactctcatgtgcagcctctggattcaccttcaatggctacgccatgaactgggtccgccaggctccaggaaagggtttggaatgggttgctcgcataagaagtaaatataataattatgcaacatattatgccgattcagtgaaagagaggttcaccatctccagagatgattcaaaaaacactgcctatctacaaatgaacaacttgaaaactgaggacactgccgtgtactactgtgtgagacataggaacttcggtaatagctacttatcctggttcgcttactggggccaagggactctggtcaccgtctcctcaggtggtggtggttctggcggcggcggctccggtggtggtggttctgagctcgttgtgactcaggaaccttcactcaccgtatcacctggtggaacagtcacactcacttgtcgctcctcgactggggctgttacatctggctactacccaaactgggtccaacaaaaaccaggtcaggcaccccgtggtctaataggtgccactgacatgaggccctctggtactcctgccagattctcaggctccctgcttggaggcaaggctgccctcaccctctcaggggtacagccagaggatgaggcagaatattactgtgctctatggtacagcaaccgctgggtgttcggtggaggaaccaaactgactgtccta

SEQ ID NO: 209 - protein, 500 aa, Artificial Sequence
  MCSP-G4 VH-VL-P x F7O VH-VL-P
QVQLVQSGAEVKRPGASMKVSCKASGYTFTNYYIHWVRQAPGQGLEWMGWINPNSGATNYAQKFQGRVTMTRDTSTSTVYMELSSLRSEDTAVYYCAKSWVSWFASWGQGTLVTVSSGGGGSGGGGSGGGGSELVMTQSPDSLAVSLGERATINCKSSQSVLNSSNNRNYLAWYQQKPGQPPKLLIYWASTRESGVPDRFSGSGSGTDFTLTISGLQAEDVAVYYCQQHYSTPFTFGPGTKVDIKSGGGGSEVQLLESGGGLVQPGGSLKLSCAASGFTFNVYAMNWVRQAPGKGLEWVARIRSKYNNYATYYADSVKKRFTISRDDSKNTAYLQMNNLKTEDTAVYYCVRHGNFGNSYISWWAYWGQGTLVTVSSGGGGSGGGGSGGGGSELVVTQEPSLTVSPGGTVTLTCGSSTGAVTSGYYPNWVQQKPGQAPRGLIGGTKFLAPGTPARFSGSLLGGKAALTLSGVQPEDEAEYYCALWYSNRWVFGGGTKLTVL

SEQ ID NO: 210 - DNA, 1500 bp, Artificial Sequence
  MCSP-G4 VH-VL-P x F7O VH-VL-P
caggtgcagctggtccagtctggggctgaggtgaagaggcctggggcctcaatgaaggtctcctgcaaggcttctgggtacaccttcaccaactactatatacactgggtgcgacaggcccctggacaaggtcttgagtggatgggttggatcaaccctaacagtggtgccacaaactatgcacagaagttccagggcagagtcaccatgaccagggacacgtccacgagcacagtctacatggagctgagcagcctgagatctgaggacacggccgtgtattactgtgcgaaatcctgggtctcctggtttgcttcctggggtcaaggaaccttggtcaccgtctcctcaggtggtggtggttctggcggcggcggctccggtggtggtggttctgagctcgtgatgacccagtctccagactccctggctgtgtctctgggcgagagggccaccatcaactgcaagtccagccagagtgttttaaacagctccaacaataggaactacttagcttggtaccagcagaaaccaggacagcctcctaagctgctcatttactgggcatctacccgggaatccggggtccctgaccgattcagtggcagcgggtctgggacagatttcactctcaccatcagtggcctgcaggctgaagatgtggcagtttattactgtcagcaacattatagtactccattcacttttggccctgggaccaaagtggatatcaaatccggaggtggtggatccgaggtgcagctgctcgagtctggaggaggattggtgcagcctggagggtcattgaaactctcatgtgcagcctctggattcaccttcaatgtgtacgccatgaactgggtccgccaggctccaggaaagggtttggaatgggttgctcgcataagaagtaaatataataattatgcaacatattatgccgattcagtgaaaaagaggttcaccatctccagagatgattcaaaaaacactgcctatctacaaatgaacaacttgaaaactgaggacactgccgtgtactactgtgtgagacatgggaacttcggtaatagctacatatcctggtgggcttactggggccaagggactctggtcaccgtctcctcaggtggtggtggttctggcggcggcggctccggtggtggtggttctgagctcgttgtgactcaggaaccttcactcaccgtatcacctggtggaacagtcacactcacttgtggctcctcgactggggctgttacatctggctactacccaaactgggtccaacaaaaaccaggtcaggcaccccgtggtctaataggtgggactaagttcctcgcccccggtactcctgccagattctcaggctccctgcttggaggcaaggctgccctcaccctctcaggggtacagccagaggatgaggcagaatattactgtgctctatggtacagcaaccgctgggtgttcggtggaggaaccaaactgactgtccta

SEQ ID NO: 211 - protein, 500 aa, Artificial Sequence
  MCSP-G4 VH-VL-P x F12Q VH-VL
QVQLVQSGAEVKRPGASMKVSCKASGYTFTNYYIHWVRQAPGQGLEWMGWINPNSGATNYAQKFQGRVTMTRDTSTSTVYMELSSLRSEDTAVYYCAKSWVSWFASWGQGTLVTVSSGGGGSGGGGSGGGGSELVMTQSPDSLAVSLGERATINCKSSQSVLNSSNNRNYLAWYQQKPGQPPKLLIYWASTRESGVPDRFSGSGSGTDFTLTISGLQAEDVAVYYCQQHYSTPFTFGPGTKVDIKSGGGGSEVQLVESGGGLVQPGGSLKLSCAASGFTFNSYAMNWVRQAPGKGLEWVARIRSKYNNYATYYADSVKGRFTISRDDSKNTAYLQMNNLKTEDTAVYYCVRHGNFGNSYVSWWAYWGQGTLVTVSSGGGGSGGGGSGGGGSQTVVTQEPSLTVSPGGTVTLTCGSSTGAVTSGNYPNWVQQKPGQAPRGLIGGTKFLAPGTPARFSGSLLGGKAALTLSGVQPEDEAEYYCVLWYSNRWVFGGGTKLTVL

SEQ ID NO: 212 - DNA, 1500 bp, Artificial Sequence
  MCSP-G4 VH-VL-P x F12Q VH-VL
caggtgcagctggtccagtctggggctgaggtgaagaggcctggggcctcaatgaaggtctcctgcaaggcttctgggtacaccttcaccaactactatatacactgggtgcgacaggcccctggacaaggtcttgagtggatgggttggatcaaccctaacagtggtgccacaaactatgcacagaagttccagggcagagtcaccatgaccagggacacgtccacgagcacagtctacatggagctgagcagcctgagatctgaggacacggccgtgtattactgtgcgaaatcctgggtctcctggtttgcttcctggggtcaaggaaccttggtcaccgtctcctcaggtggtggtggttctggcggcggcggctccggtggtggtggttctgagctcgtgatgacccagtctccagactccctggctgtgtctctgggcgagagggccaccatcaactgcaagtccagccagagtgttttaaacagctccaacaataggaactacttagcttggtaccagcagaaaccaggacagcctcctaagctgctcatttactgggcatctacccgggaatccggggtccctgaccgattcagtggcagcgggtctgggacagatttcactctcaccatcagtggcctgcaggctgaagatgtggcagtttattactgtcagcaacattatagtactccattcacttttggccctgggaccaaagtggatatcaaatccggaggtggtggatccgaggtgcagctggtcgagtctggaggaggattggtgcagcctggagggtcattgaaactctcatgtgcagcctctggattcaccttcaatagctacgccatgaactgggtccgccaggctccaggaaagggtttggaatgggttgctcgcataagaagtaaatataataattatgcaacatattatgccgattcagtgaaaggcaggttcaccatctccagagatgattcaaaaaacactgcctatctacaaatgaacaacttgaaaactgaggacactgccgtgtactactgtgtgagacatgggaacttcggtaatagctacgtttcctggtgggcttactggggccaagggactctggtcaccgtctcctcaggtggtggtggttctggcggcggcggctccggtggtggtggttctcagactgttgtgactcaggaaccttcactcaccgtatcacctggtggaacagtcacactcacttgtggctcctcgactggggctgttacatctggcaactacccaaactgggtccaacaaaaaccaggtcaggcaccccgtggtctaataggtgggactaagttcctcgcccccggtactcctgccagattctcaggctccctgcttggaggcaaggctgccctcaccctctcaggggtacagccagaggatgaggcagaatattactgtgttctatggtacagcaaccgctgggtgttcggtggaggaaccaaactgactgtccta

SEQ ID NO: 213 - protein, 500 aa, Artificial Sequence
  MCSP-G4 VH-VL-P x I2C VH-VL
QVQLVQSGAEVKRPGASMKVSCKASGYTFTNYYIHWVRQAPGQGLEWMGWINPNSGATNYAQKFQGRVTMTRDTSTSTVYMELSSLRSEDTAVYYCAKSWVSWFASWGQGTLVTVSSGGGGSGGGGSGGGGSELVMTQSPDSLAVSLGERATINCKSSQSVLNSSNNRNYLAWYQQKPGQPPKLLIYWASTRESGVPDRFSGSGSGTDFTLTISGLQAEDVAVYYCQQHYSTPFTFGPGTKVDIKSGGGGSEVQLVESGGGLVQPGGSLKLSCAASGFTFNKYAMNWVRQAPGKGLEWVARIRSKYNNYATYYADSVKDRFTISRDDSKNTAYLQMNNLKTEDTAVYYCVRHGNFGNSYISYWAYWGQGTLVTVSSGGGGSGGGGSGGGGSQTVVTQEPSLTVSPGGTVTLTCGSSTGAVTSGNYPNWVQQKPGQAPRGLIGGTKFLAPGTPARFSGSLLGGKAALTLSGVQPEDEAEYYCVLWYSNRWVFGGGTKLTVL

SEQ ID NO: 214 - DNA, 1500 bp, Artificial Sequence
  MCSP-G4 VH-VL-P x I2C VH-VL
caggtgcagctggtccagtctggggctgaggtgaagaggcctggggcctcaatgaaggtctcctgcaaggcttctgggtacaccttcaccaactactatatacactgggtgcgacaggcccctggacaaggtcttgagtggatgggttggatcaaccctaacagtggtgccacaaactatgcacagaagttccagggcagagtcaccatgaccagggacacgtccacgagcacagtctacatggagctgagcagcctgagatctgaggacacggccgtgtattactgtgcgaaatcctgggtctcctggtttgcttcctggggtcaaggaaccttggtcaccgtctcctcaggtggtggtggttctggcggcggcggctccggtggtggtggttctgagctcgtgatgacccagtctccagactccctggctgtgtctctgggcgagagggccaccatcaactgcaagtccagccagagtgttttaaacagctccaacaataggaactacttagcttggtaccagcagaaaccaggacagcctcctaagctgctcatttactgggcatctacccgggaatccggggtccctgaccgattcagtggcagcgggtctgggacagatttcactctcaccatcagtggcctgcaggctgaagatgtggcagtttattactgtcagcaacattatagtactccattcacttttggccctgggaccaaagtggatatcaaatccggaggtggtggatccgaggtgcagctggtcgagtctggaggaggattggtgcagcctggagggtcattgaaactctcatgtgcagcctctggattcaccttcaataagtacgccatgaactgggtccgccaggctccaggaaagggtttggaatgggttgctcgcataagaagtaaatataataattatgcaacatattatgccgattcagtgaaagacaggttcaccatctccagagatgattcaaaaaacactgcctatctacaaatgaacaacttgaaaactgaggacactgccgtgtactactgtgtgagacatgggaacttcggtaatagctacatatcctactgggcttactggggccaagggactctggtcaccgtctcctcaggtggtggtggttctggcggcggcggctccggtggtggtggttctcagactgttgtgactcaggaaccttcactcaccgtatcacctggtggaacagtcacactcacttgtggctcctcgactggggctgttacatctggcaactacccaaactgggtccaacaaaaaccaggtcaggcaccccgtggtctaataggtgggactaagttcctcgcccccggtactcctgccagattctcaggctccctgcttggaggcaaggctgccctcaccctctcaggggtacagccagaggatgaggcagaatattactgtgttctatggtacagcaaccgctgggtgttcggtggaggaaccaaactgactgtccta

SEQ ID NO: 215 - protein, 500 aa, Artificial Sequence
  MCSP-D2 VH-VL x H2C VH-VL
QVQLVQSGAEVKKPGASVKVSCKASGYTFTGYYMHWVRQAPGQGLEWMGWINPNSGGTSYAQKFQGRVTMTRDTSTSTVYMELSNLRSDDTAVYYCAKSWVSWFASWGQGTLVTVSSGGGGSGGGGSGGGGSDIVMTQSPDSLAVSLGERATINCKSSQSVLNSSNNRNYLAWYQQKPGQPPKLLIYWASTRESGVPDRFSGSGSGTDFTLTISGLQAEDVAVYYCQQHYSTPFTFGPGTKVDIKSGGGGSEVQLVESGGGLVQPGGSLKLSCAASGFTFNKYAMNWVRQAPGKGLEWVARIRSKYNNYATYYADSVKDRFTISRDDSKNTAYLQMNNLKTEDTAVYYCVRHGNFGNSYISYWAYWGQGTLVTVSSGGGGSGGGGSGGGGSQTVVTQEPSLTVSPGGTVTLTCGSSTGAVTSGYYPNWVQQKPGQAPRGLIGGTKFLAPGTPARFSGSLLGGKAALTLSGVQPEDEAEYYCALWYSNRWVFGGGTKLTVL

SEQ ID NO: 216 - DNA, 1500 bp, Artificial Sequence
  MCSP-D2 VH-VL x H2C VH-VL
caggtgcagctggtccagtctggggctgaggtgaagaagcctggggcctcagtgaaggtctcctgcaaggcttctggatacaccttcaccggctactatatgcactgggtgcgacaggcccctggacaagggcttgagtggatgggatggatcaaccctaacagtggtggcacaagctacgcacagaagttccagggcagagtcaccatgactagggacacgtccacgagcacagtctacatggagctgagcaacctgagatctgacgacacggccgtgtattactgtgcgaaatcctgggtctcctggtttgcttcctggggtcaaggaaccttggtcaccgtctcctcaggtggtggtggttctggcggcggcggctccggtggtggtggttctgatatcgtgatgacccagtctccagactccctggctgtgtctctgggcgagagggccaccatcaactgcaagtccagccagagtgttttaaacagctccaacaataggaactacttagcttggtaccagcagaaaccaggacagcctcctaagctgctcatttactgggcatctacccgggaatccggggtccctgaccgattcagtggcagcgggtctgggacagatttcactctcaccatcagtggcctgcaggctgaagatgtggcagtttattactgtcagcaacattatagtactccattcacttttggccctgggaccaaagtggatatcaaatccggaggtggtggatccgaggtgcagctggtcgagtctggaggaggattggtgcagcctggagggtcattgaaactctcatgtgcagcctctggattcaccttcaataagtacgccatgaactgggtccgccaggctccaggaaagggtttggaatgggttgctcgcataagaagtaaatataataattatgcaacatattatgccgattcagtgaaagacaggttcaccatctccagagatgattcaaaaaacactgcctatctacaaatgaacaacttgaaaactgaggacactgccgtgtactactgtgtgagacatgggaacttcggtaatagctacatatcctactgggcttactggggccaagggactctggtcaccgtctcctcaggtggtggtggttctggcggcggcggctccggtggtggtggttctcagactgttgtgactcaggaaccttcactcaccgtatcacctggtggaacagtcacactcacttgtggctcctcgactggggctgttacatctggctactacccaaactgggtccaacaaaaaccaggtcaggcaccccgtggtctaataggtgggactaagttcctcgcccccggtactcctgccagattctcaggctccctgcttggaggcaaggctgccctcaccctctcaggggtacagccagaggatgaggcagaatattactgtgctctatggtacagcaaccgctgggtgttcggtggaggaaccaaactgactgtccta

SEQ ID NO: 217 - protein, 500 aa, Artificial Sequence
  MCSP-D2 VH-VL x F12Q VH-VL
QVQLVQSGAEVKKPGASVKVSCKASGYTFTGYYMHWVRQAPGQGLEWMGWINPNSGGTSYAQKFQGRVTMTRDTSTSTVYMELSNLRSDDTAVYYCAKSWVSWFASWGQGTLVTVSSGGGGSGGGGSGGGGSDIVMTQSPDSLAVSLGERATINCKSSQSVLNSSNNRNYLAWYQQKPGQPPKLLIYWASTRESGVPDRFSGSGSGTDFTLTISGLQAEDVAVYYCQQHYSTPFTFGPGTKVDIKSGGGGSEVQLVESGGGLVQPGGSLKLSCAASGFTFNSYAMNWVRQAPGKGLEWVARIRSKYNNYATYYADSVKGRFTISRDDSKNTAYLQMNNLKTEDTAVYYCVRHGNFGNSYVSWWAYWGQGTLVTVSSGGGGSGGGGSGGGGSQTVVTQEPSLTVSPGGTVTLTCGSSTGAVTSGNYPNWVQQKPGQAPRGLIGGTKFLAPGTPARFSGSLLGGKAALTLSGVQPEDEAEYYCVLWYSNRWVFGGGTKLTVL

SEQ ID NO: 218 - DNA, 1500 bp, Artificial Sequence
  MCSP-D2 VH-VL x F12Q VH-VL
caggtgcagctggtccagtctggggctgaggtgaagaagcctggggcctcagtgaaggtctcctgcaaggcttctggatacaccttcaccggctactatatgcactgggtgcgacaggcccctggacaagggcttgagtggatgggatggatcaaccctaacagtggtggcacaagctacgcacagaagttccagggcagagtcaccatgactagggacacgtccacgagcacagtctacatggagctgagcaacctgagatctgacgacacggccgtgtattactgtgcgaaatcctgggtctcctggtttgcttcctggggtcaaggaaccttggtcaccgtctcctcaggtggtggtggttctggcggcggcggctccggtggtggtggttctgatatcgtgatgacccagtctccagactccctggctgtgtctctgggcgagagggccaccatcaactgcaagtccagccagagtgttttaaacagctccaacaataggaactacttagcttggtaccagcagaaaccaggacagcctcctaagctgctcatttactgggcatctacccgggaatccggggtccctgaccgattcagtggcagcgggtctgggacagatttcactctcaccatcagtggcctgcaggctgaagatgtggcagtttattactgtcagcaacattatagtactccattcacttttggccctgggaccaaagtggatatcaaatccggaggtggtggatccgaggtgcagctggtcgagtctggaggaggattggtgcagcctggagggtcattgaaactctcatgtgcagcctctggattcaccttcaatagctacgccatgaactgggtccgccaggctccaggaaagggtttggaatgggttgctcgcataagaagtaaatataataattatgcaacatattatgccgattcagtgaaaggcaggttcaccatctccagagatgattcaaaaaacactgcctatctacaaatgaacaacttgaaaactgaggacactgccgtgtactactgtgtgagacatgggaacttcggtaatagctacgtttcctggtgggcttactggggccaagggactctggtcaccgtctcctcaggtggtggtggttctggcggcggcggctccggtggtggtggttctcagactgttgtgactcaggaaccttcactcaccgtatcacctggtggaacagtcacactcacttgtggctcctcgactggggctgttacatctggcaactacccaaactgggtccaacaaaaaccaggtcaggcaccccgtggtctaataggtgggactaagttcctcgcccccggtactcctgccagattctcaggctccctgcttggaggcaaggctgccctcaccctctcaggggtacagccagaggatgaggcagaatattactgtgttctatggtacagcaaccgctgggtgttcggtggaggaaccaaactgactgtccta

SEQ ID NO: 219 - protein, 500 aa, Artificial Sequence
  MCSP-D2 VH-VL x I2C VH-VL
QVQLVQSGAEVKKPGASVKVSCKASGYTFTGYYMHWVRQAPGQGLEWMGWINPNSGGTSYAQKFQGRVTMTRDTSTSTVYMELSNLRSDDTAVYYCAKSWVSWFASWGQGTLVTVSSGGGGSGGGGSGGGGSDIVMTQSPDSLAVSLGERATINCKSSQSVLNSSNNRNYLAWYQQKPGQPPKLLIYWASTRESGVPDRFSGSGSGTDFTLTISGLQAEDVAVYYCQQHYSTPFTFGPGTKVDIKSGGGGSEVQLVESGGGLVQPGGSLKLSCAASGFTFNKYAMNWVRQAPGKGLEWVARIRSKYNNYATYYADSVKDRFTISRDDSKNTAYLQMNNLKTEDTAVYYCVRHGNFGNSYISYWAYWGQGTLVTVSSGGGGSGGGGSGGGGSQTVVTQEPSLTVSPGGTVTLTCGSSTGAVTSGNYPNWVQQKPGQAPRGLIGGTKFLAPGTPARFSGSLLGGKAALTLSGVQPEDEAEYYCVLWYSNRWVFGGGTKLTVL

SEQ ID NO: 220 - DNA, 1500 bp, Artificial Sequence
  MCSP-D2 VH-VL x I2C VH-VL
caggtgcagctggtccagtctggggctgaggtgaagaagcctggggcctcagtgaaggtctcctgcaaggcttctggatacaccttcaccggctactatatgcactgggtgcgacaggcccctggacaagggcttgagtggatgggatggatcaaccctaacagtggtggcacaagctacgcacagaagttccagggcagagtcaccatgactagggacacgtccacgagcacagtctacatggagctgagcaacctgagatctgacgacacggccgtgtattactgtgcgaaatcctgggtctcctggtttgcttcctggggtcaaggaaccttggtcaccgtctcctcaggtggtggtggttctggcggcggcggctccggtggtggtggttctgatatcgtgatgacccagtctccagactccctggctgtgtctctgggcgagagggccaccatcaactgcaagtccagccagagtgttttaaacagctccaacaataggaactacttagcttggtaccagcagaaaccaggacagcctcctaagctgctcatttactgggcatctacccgggaatccggggtccctgaccgattcagtggcagcgggtctgggacagatttcactctcaccatcagtggcctgcaggctgaagatgtggcagtttattactgtcagcaacattatagtactccattcacttttggccctgggaccaaagtggatatcaaatccggaggtggtggatccgaggtgcagctggtcgagtctggaggaggattggtgcagcctggagggtcattgaaactctcatgtgcagcctctggattcaccttcaataagtacgccatgaactgggtccgccaggctccaggaaagggtttggaatgggttgctcgcataagaagtaaatataataattatgcaacatattatgccgattcagtgaaagacaggttcaccatctccagagatgattcaaaaaacactgcctatctacaaatgaacaacttgaaaactgaggacactgccgtgtactactgtgtgagacatgggaacttcggtaatagctacatatcctactgggcttactggggccaagggactctggtcaccgtctcctcaggtggtggtggttctggcggcggcggctccggtggtggtggttctcagactgttgtgactcaggaaccttcactcaccgtatcacctggtggaacagtcacactcacttgtggctcctcgactggggctgttacatctggcaactacccaaactgggtccaacaaaaaccaggtcaggcaccccgtggtctaataggtgggactaagttcctcgcccccggtactcctgccagattctcaggctccctgcttggaggcaaggctgccctcaccctctcaggggtacagccagaggatgaggcagaatattactgtgttctatggtacagcaaccgctgggtgttcggtggaggaaccaaactgactgtccta

SEQ ID NO: 221 - protein, 500 aa, Artificial Sequence
  MCSP-D2 VH-VL-P x H2C VH-VL-P
QVQLVQSGAEVKKPGASVKVSCKASGYTFTGYYMHWVRQAPGQGLEWMGWINPNSGGTSYAQKFQGRVTMTRDTSTSTVYMELSNLRSDDTAVYYCAKSWVSWFASWGQGTLVTVSSGGGGSGGGGSGGGGSELVMTQSPDSLAVSLGERATINCKSSQSVLNSSNNRNYLAWYQQKPGQPPKLLIYWASTRESGVPDRFSGSGSGTDFTLTISGLQAEDVAVYYCQQHYSTPFTFGPGTKVDIKSGGGGSEVQLLESGGGLVQPGGSLKLSCAASGFTFNKYAMNWVRQAPGKGLEWVARIRSKYNNYATYYADSVKDRFTISRDDSKNTAYLQMNNLKTEDTAVYYCVRHGNFGNSYISYWAYWGQGTLVTVSSGGGGSGGGGSGGGGSELVVTQEPSLTVSPGGTVTLTCGSSTGAVTSGYYPNWVQQKPGQAPRGLIGGTKFLAPGTPARFSGSLLGGKAALTLSGVQPEDEAEYYCALWYSNRWVFGGGTKLTVL

SEQ ID NO: 222 - DNA, 1500 bp, Artificial Sequence
  MCSP-D2 VH-VL-P x H2C VH-VL-P
caggtgcagctggtccagtctggggctgaggtgaagaagcctggggcctcagtgaaggtctcctgcaaggcttctggatacaccttcaccggctactatatgcactgggtgcgacaggcccctggacaagggcttgagtggatgggatggatcaaccctaacagtggtggcacaagctacgcacagaagttccagggcagagtcaccatgactagggacacgtccacgagcacagtctacatggagctgagcaacctgagatctgacgacacggccgtgtattactgtgcgaaatcctgggtctcctggtttgcttcctggggtcaaggaaccttggtcaccgtctcctcaggtggtggtggttctggcggcggcggctccggtggtggtggttctgagctcgtgatgacccagtctccagactccctggctgtgtctctgggcgagagggccaccatcaactgcaagtccagccagagtgttttaaacagctccaacaataggaactacttagcttggtaccagcagaaaccaggacagcctcctaagctgctcatttactgggcatctacccgggaatccggggtccctgaccgattcagtggcagcgggtctgggacagatttcactctcaccatcagtggcctgcaggctgaagatgtggcagtttattactgtcagcaacattatagtactccattcacttttggccctgggaccaaagtggatatcaaatccggaggtggtggatccgaggtgcagctgctcgagtctggaggaggattggtgcagcctggagggtcattgaaactctcatgtgcagcctctggattcaccttcaataagtacgccatgaactgggtccgccaggctccaggaaagggtttggaatgggttgctcgcataagaagtaaatataataattatgcaacatattatgccgattcagtgaaagacaggttcaccatctccagagatgattcaaaaaacactgcctatctacaaatgaacaacttgaaaactgaggacactgccgtgtactactgtgtgagacatgggaacttcggtaatagctacatatcctactgggcttactggggccaagggactctggtcaccgtctcctcaggtggtggtggttctggcggcggcggctccggtggtggtggttctgagctcgttgtgactcaggaaccttcactcaccgtatcacctggtggaacagtcacactcacttgtggctcctcgactggggctgttacatctggctactacccaaactgggtccaacaaaaaccaggtcaggcaccccgtggtctaataggtgggactaagttcctcgcccccggtactcctgccagattctcaggctccctgcttggaggcaaggctgccctcaccctctcaggggtacagccagaggatgaggcagaatattactgtgctctatggtacagcaaccgctgggtgttcggtggaggaaccaaactgactgtccta

SEQ ID NO: 223 - protein, 499 aa, Artificial Sequence
  MCSP-F9 VH-VL x H2C VH-VL
QVQLQESGPGLVKPSETLSLTCVVSGGSISSSNWWSWVRQPPGKGLEWLGTIYYNGNTYYNPSLKSRVTISVDTSKNQFSLRLSSVTAADTAVYYCAKSWVSWFASWGQGTLVTVSSGGGGSGGGGSGGGGSDIVMTQSPDSLAVSLGERATINCKSSQSVLSSSNNKNYLNWYQQKPGQPPKLLIYWASTRESGVPDRFSGSGSGTDFTLTISSLQAEDVAVYYCQQHYSVPFTFGPGTKVDIKGGGGSEVQLVESGGGLVQPGGSLKLSCAASGFTFNKYAMNWVRQAPGKGLEWVARIRSKYNNYATYYADSVKDRFTISRDDSKNTAYLQMNNLKTEDTAVYYCVRHGNFGNSYISYWAYWGQGTLVTVSSGGGGSGGGGSGGGGSQTVVTQEPSLTVSPGGTVTLTCGSSTGAVTSGYYPNWVQQKPGQAPRGLIGGTKFLAPGTPARFSGSLLGGKAALTLSGVQPEDEAEYYCALWYSNRWVFGGGTKLTVL

SEQ ID NO: 224 - DNA, 1497 bp, Artificial Sequence
  MCSP-F9 VH-VL x H2C VH-VL
caggtgcagctgcaagagtctggcccaggactggtgaagccttcggagaccctgtccctcacctgcgttgtctctggtggctccatcagcagtagtaactggtggagctgggtccgccagcccccagggaagggactggagtggcttgggactatctattataatgggaatacctactacaacccgtccctcaagagtcgagtcaccatctccgtagacacgtccaagaaccagttctccctgaggctgagctctgtgaccgccgcagacacggccgtgtattactgtgcgaaatcctgggtctcctggtttgcttcctggggtcaaggaaccttggtcaccgtctcctcaggtggtggtggttctggcggcggcggctccggtggtggtggttctgatatcgtgatgacacagtctccagactccctggctgtgtctctgggcgagagggccaccatcaactgcaagtccagccagagtgtcttatccagctccaacaataagaactacttaaattggtaccagcagaaaccaggacagcctcctaagttgctcatttactgggcatctacccgggaatccggggtccctgaccgattcagtggcagcgggtctgggacagatttcactctcaccatcagcagcctgcaggctgaagatgtggcagtttattactgtcagcaacattatagtgttccattcactttcggccctgggaccaaagtggatatcaaaggaggtggtggctccgaggtgcagctggtcgagtctggaggaggattggtgcagcctggagggtcattgaaactctcatgtgcagcctctggattcaccttcaataagtacgccatgaactgggtccgccaggctccaggaaagggtttggaatgggttgctcgcataagaagtaaatataataattatgcaacatattatgccgattcagtgaaagacaggttcaccatctccagagatgattcaaaaaacactgcctatctacaaatgaacaacttgaaaactgaggacactgccgtgtactactgtgtgagacatgggaacttcggtaatagctacatatcctactgggcttactggggccaagggactctggtcaccgtctcctcaggtggtggtggttctggcggcggcggctccggtggtggtggttctcagactgttgtgactcaggaaccttcactcaccgtatcacctggtggaacagtcacactcacttgtggctcctcgactggggctgttacatctggctactacccaaactgggtccaacaaaaaccaggtcaggcaccccgtggtctaataggtgggactaagttcctcgcccccggtactcctgccagattctcaggctccctgcttggaggcaaggctgccctcaccctctcaggggtacagccagaggatgaggcagaatattactgtgctctatggtacagcaaccgctgggtgttcggtggaggaaccaaactgactgtccta

SEQ ID NO: 225 - protein, 500 aa, Artificial Sequence
  MCSP-F9 VH-VL-P x H2C VH-VL-P
EVQLQESGPGLVKPSETLSLTCVVSGGSISSSNWWSWVRQPPGKGLEWLGTIYYNGNTYYNPSLKSRVTISVDTSKNQFSLRLSSVTAADTAVYYCAKSWVSWFASWGQGTLVTVSSGGGGSGGGGSGGGGSELVMTQSPDSLAVSLGERATINCKSSQSVLSSSNNKNYLNWYQQKPGQPPKLLIYWASTRESGVPDRFSGSGSGTDFTLTISSLQAEDVAVYYCQQHYSVPFTFGPGTKVDIKSGGGGSEVQLLESGGGLVQPGGSLKLSCAASGFTFNKYAMNWVRQAPGKGLEWVARIRSKYNNYATYYADSVKDRFTISRDDSKNTAYLQMNNLKTEDTAVYYCVRHGNFGNSYISYWAYWGQGTLVTVSSGGGGSGGGGSGGGGSELVVTQEPSLTVSPGGTVTLTCGSSTGAVTSGYYPNWVQQKPGQAPRGLIGGTKFLAPGTPARFSGSLLGGKAALTLSGVQPEDEAEYYCALWYSNRWVFGGGTKLTVL

SEQ ID NO: 226 - DNA, 1500 bp, Artificial Sequence
  MCSP-F9 VH-VL-P x H2C VH-VL-P
gaggtgcagctgcaagagtctggcccaggactggtgaagccttcggagaccctgtccctcacctgcgttgtctctggtggctccatcagcagtagtaactggtggagctgggtccgccagcccccagggaagggactggagtggcttgggactatctattataatgggaatacctactacaacccgtccctcaagagtcgagtcaccatctccgtagacacgtccaagaaccagttctccctgaggctgagctctgtgaccgccgcagacacggccgtgtattactgtgcgaaatcctgggtctcctggtttgcttcctggggtcaaggaaccttggtcaccgtctcctcaggtggtggtggttctggcggcggcggctccggtggtggtggttctgagctcgtgatgacacagtctccagactccctggctgtgtctctgggcgagagggccaccatcaactgcaagtccagccagagtgtcttatccagctccaacaataagaactacttaaattggtaccagcagaaaccaggacagcctcctaagttgctcatttactgggcatctacccgggaatccggggtccctgaccgattcagtggcagcgggtctgggacagatttcactctcaccatcagcagcctgcaggctgaagatgtggcagtttattactgtcagcaacattatagtgttccattcactttcggccctgggaccaaagtggatatcaaatccggaggtggtggatccgaggtgcagctgctcgagtctggaggaggattggtgcagcctggagggtcattgaaactctcatgtgcagcctctggattcaccttcaataagtacgccatgaactgggtccgccaggctccaggaaagggtttggaatgggttgctcgcataagaagtaaatataataattatgcaacatattatgccgattcagtgaaagacaggttcaccatctccagagatgattcaaaaaacactgcctatctacaaatgaacaacttgaaaactgaggacactgccgtgtactactgtgtgagacatgggaacttcggtaatagctacatatcctactgggcttactggggccaagggactctggtcaccgtctcctcaggtggtggtggttctggcggcggcggctccggtggtggtggttctgagctcgttgtgactcaggaaccttcactcaccgtatcacctggtggaacagtcacactcacttgtggctcctcgactggggctgttacatctggctactacccaaactgggtccaacaaaaaccaggtcaggcaccccgtggtctaataggtgggactaagttcctcgcccccggtactcctgccagattctcaggctccctgcttggaggcaaggctgccctcaccctctcaggggtacagccagaggatgaggcagaatattactgtgctctatggtacagcaaccgctgggtgttcggtggaggaaccaaactgactgtccta

SEQ ID NO: 227 - protein, 500 aa, Artificial Sequence
  MCSP-F9 VH-VL-P x G4H VH-VL-P
EVQLQESGPGLVKPSETLSLTCVVSGGSISSSNWWSWVRQPPGKGLEWLGTIYYNGNTYYNPSLKSRVTISVDTSKNQFSLRLSSVTAADTAVYYCAKSWVSWFASWGQGTLVTVSSGGGGSGGGGSGGGGSELVMTQSPDSLAVSLGERATINCKSSQSVLSSSNNKNYLNWYQQKPGQPPKLLIYWASTRESGVPDRFSGSGSGTDFTLTISSLQAEDVAVYYCQQHYSVPFTFGPGTKVDIKSGGGGSEVQLLESGGGLVQPGGSLKLSCAASGFTFNRYAMNWVRQAPGKGLEWVARIRSKYNNYATYYADSVKGRFTISRDDSKNTAYLQMNNLKTEDTAVYYCVRHGNFGNSYLSYFAYWGQGTLVTVSSGGGGSGGGGSGGGGSELVVTQEPSLTVSPGGTVTLTCGSSTGAVTSGYYPNWVQQKPGQAPRGLIGGTKFLAPGTPARFSGSLLGGKAALTLSGVQPEDEAEYYCALWYSNRWVFGGGTKLTVL

SEQ ID NO: 228 - DNA, 1500 bp, Artificial Sequence
  MCSP-F9 VH-VL-P x G4H VH-VL-P
gaggtgcagctgcaagagtctggcccaggactggtgaagccttcggagaccctgtccctcacctgcgttgtctctggtggctccatcagcagtagtaactggtggagctgggtccgccagcccccagggaagggactggagtggcttgggactatctattataatgggaatacctactacaacccgtccctcaagagtcgagtcaccatctccgtagacacgtccaagaaccagttctccctgaggctgagctctgtgaccgccgcagacacggccgtgtattactgtgcgaaatcctgggtctcctggtttgcttcctggggtcaaggaaccttggtcaccgtctcctcaggtggtggtggttctggcggcggcggctccggtggtggtggttctgagctcgtgatgacacagtctccagactccctggctgtgtctctgggcgagagggccaccatcaactgcaagtccagccagagtgtcttatccagctccaacaataagaactacttaaattggtaccagcagaaaccaggacagcctcctaagttgctcatttactgggcatctacccgggaatccggggtccctgaccgattcagtggcagcgggtctgggacagatttcactctcaccatcagcagcctgcaggctgaagatgtggcagtttattactgtcagcaacattatagtgttccattcactttcggccctgggaccaaagtggatatcaaatccggaggtggtggatccgaggtgcagctgctcgagtctggaggaggattggtgcagcctggagggtcattgaaactctcatgtgcagcctctggattcaccttcaatcgctacgccatgaactgggtccgccaggctccaggaaagggtttggaatgggttgctcgcataagaagtaaatataataattatgcaacatattatgccgattcagtgaaagggaggttcaccatctccagagatgattcaaaaaacactgcctatctacaaatgaacaacttgaaaactgaggacactgccgtgtactactgtgtgagacatgggaacttcggtaatagctacttatcctacttcgcttactggggccaagggactctggtcaccgtctcctcaggtggtggtggttctggcggcggcggctccggtggtggtggttctgagctcgttgtgactcaggaaccttcactcaccgtatcacctggtggaacagtcacactcacttgtggctcctcgactggggctgttacatctggctactacccaaactgggtccaacaaaaaccaggtcaggcaccccgtggtctaataggtgggactaagttcctcgcccccggtactcctgccagattctcaggctccctgcttggaggcaaggctgccctcaccctctcaggggtacagccagaggatgaggcagaatattactgtgctctatggtacagcaaccgctgggtgttcggtggaggaaccaaactgactgtccta

SEQ ID NO: 229 - protein, 267 aa, Artificial Sequence
  1-27 CD3 epsilon-Fc
QDGNEEMGGITQTPYKVSISGTTVILTSGEPKSCDKTHTCPPCPAPELLGGPSVFLFPPKPKDTLMISRTPEVTCVVVDVSHEDPEVKFNWYVDGVEVHNAKTKPREEQYNSTYRVVSVLTVLHQDWLNGKEYKCKVSNKALPAPIEKTISKAKGQPREPQVYTLPPSREEMTKNQVSLTCLVKGFYPSDIAVEWESNGQPENNYKTTPPVLDSDGSFFLYSKLTVDKSRWQQGNVFSCSVMHEALHNHYTQKSLSLSPGKHHHHHH

SEQ ID NO: 230 - DNA, 858 bp, Artificial Sequence
  1-27 CD3 epsilon-Fc
atgggatggagctgtatcatcctcttcttggtagcaacagctacaggtgtacactcccaagatggtaatgaagaaatgggtggtattacacagacaccatataaagtctccatctctggaaccacagtaatattgacatccggagagcccaaatcttgtgacaaaactcacacatgcccaccgtgcccagcacctgaactcctggggggaccgtcagtcttcctcttccccccaaaacccaaggacaccctcatgatctcccggacccctgaggtcacatgcgtggtggtggacgtgagccacgaagaccctgaggtcaagttcaactggtacgtggacggcgtggaggtgcataatgccaagacaaagccgcgggaggagcagtacaacagcacgtaccgtgtggtcagcgtcctcaccgtcctgcaccaggactggctgaatggcaaggagtacaagtgcaaggtctccaacaaagccctcccagcccccatcgagaaaaccatctccaaagccaaagggcagccccgagaaccacaggtgtacaccctgcccccatcccgggaggagatgaccaagaaccaggtcagcctgacctgcctggtcaaaggcttctatcccagcgacatcgccgtggagtgggagagcaatgggcagccggagaacaactacaagaccacgcctcccgtgctggactccgacggctccttcttcctctatagcaagctcaccgtggacaagagcaggtggcagcaggggaacgtcttctcatgctccgtgatgcatgaggctctgcacaaccactacacgcagaagagcctctccctgtccccgggtaaacatcatcaccatcatcat

SEQ ID NO: 231 - protein, 333 aa, Artificial Sequence
  human 1-27 CD3 epsilon-EpCAM
QDGNEEMGGITQTPYKVSISGTTVILTDYKDDDDKTASFAAAQKECVCENYKLAVNCFLNDNGQCQCTSIGAQNTVLCSKLAAKCLVMKAEMNGSKLGRRAKPEGALQNNDGLYDPDCDESGLFKAKQCNGTSTCWCVNTAGVRRTDKDTEITCSERVRTYWIIIELKHKAREKPYDVQSLRTALEEAIKTRYQLDPKFITNILYEDNVITIDLVQNSSQKTQNDVDIADVAYYFEKDVKGESLFHSKKMDLRVNGEQLDLDPGQTLIYYVDEKAPEFSMQGLKAGVIAVIVVVVIAIVAGIVVLVISRKKRMAKYEKAEIKEMGEMHRELNA

SEQ ID NO: 232 - DNA, 1056 bp, Artificial Sequence
  human 1-27 CD3 epsilon-EpCAM
atgggatggagctgtatcatcctcttcttggtagcaacagctacaggtgtacactcccaagatggtaatgaagaaatgggtggtattacacagacaccatataaagtctccatctctggaaccacagtaatattgacagattacaaggacgacgatgacaagactgcgagttttgccgcagctcagaaagaatgtgtctgtgaaaactacaagctggccgtaaactgctttttgaatgacaatggtcaatgccagtgtacttcgattggtgcacaaaatactgtcctttgctcaaagctggctgccaaatgtttggtgatgaaggcagaaatgaacggctcaaaacttgggagaagagcgaaacctgaaggggctctccagaacaatgatggcctttacgatcctgactgcgatgagagcgggctctttaaggccaagcagtgcaacggcacctccacgtgctggtgtgtgaacactgctggggtcagaagaactgacaaggacactgaaataacctgctctgagcgagtgagaacctactggatcatcattgaattaaaacacaaagcaagagaaaaaccttatgatgttcaaagtttgcggactgcacttgaggaggcgatcaaaacgcgttatcaactggatccaaaatttatcacaaatattttgtatgaggataatgttatcactattgatctggttcaaaattcttctcagaaaactcagaatgatgtggacatagctgatgtggcttattattttgaaaaagatgttaaaggtgaatccttgtttcattctaagaaaatggacctgagagtaaatggggaacaactggatctggatcctggtcaaactttaatttattatgtcgatgaaaaagcacctgaattctcaatgcagggtctaaaagctggtgttattgctgttattgtggttgtggtgatagcaattgttgctggaattgttgtgctggttatttccagaaagaagagaatggcaaagtatgagaaggctgagataaaggagatgggtgagatgcatagggaactcaatgca

SEQ ID NO: 233 - protein, 333 aa, Artificial Sequence
  marmoset 1-27 CD3 epsilon-EpCAM
QDGNEEMGDTTQNPYKVSISGTTVTLTDYKDDDDKTASFAAAQKECVCENYKLAVNCFLNDNGQCQCTSIGAQNTVLCSKLAAKCLVMKAEMNGSKLGRRAKPEGALQNNDGLYDPDCDESGLFKAKQCNGTSTCWCVNTAGVRRTDKDTEITCSERVRTYWIIIELKHKAREKPYDVQSLRTALEEAIKTRYQLDPKFITNILYEDNVITIDLVQNSSQKTQNDVDIADVAYYFEKDVKGESLFHSKKMDLRVNGEQLDLDPGQTLIYYVDEKAPEFSMQGLKAGVIAVIVVVVIAIVAGIVVLVISRKKRMAKYEKAEIKEMGEMHRELNA

SEQ ID NO: 234 - DNA, 1056 bp, Artificial Sequence
  marmoset 1-27 CD3 epsilon-EpCAM
atgggatggagctgtatcatcctcttcttggtagcaacagctacaggtgtacactcccaggacggtaatgaagaaatgggtgatactacacagaacccatataaagtttccatctcaggaaccacagtaacactgacagattacaaggacgacgatgacaagactgcgagttttgccgcagctcagaaagaatgtgtctgtgaaaactacaagctggccgtaaactgctttttgaatgacaatggtcaatgccagtgtacttcgattggtgcacaaaatactgtcctttgctcaaagctggctgccaaatgtttggtgatgaaggcagaaatgaacggctcaaaacttgggagaagagcgaaacctgaaggggctctccagaacaatgatggcctttacgatcctgactgcgatgagagcgggctctttaaggccaagcagtgcaacggcacctccacgtgctggtgtgtgaacactgctggggtcagaagaactgacaaggacactgaaataacctgctctgagcgagtgagaacctactggatcatcattgaattaaaacacaaagcaagagaaaaaccttatgatgttcaaagtttgcggactgcacttgaggaggcgatcaaaacgcgttatcaactggatccaaaatttatcacaaatattttgtatgaggataatgttatcactattgatctggttcaaaattcttctcagaaaactcagaatgatgtggacatagctgatgtggcttattattttgaaaaagatgttaaaggtgaatccttgtttcattctaagaaaatggacctgagagtaaatggggaacaactggatctggatcctggtcaaactttaatttattatgtcgatgaaaaagcacctgaattctcaatgcagggtctaaaagctggtgttattgctgttattgtggttgtggtgatagcaattgttgctggaattgttgtgctggttatttccagaaagaagagaatggcaaagtatgagaaggctgagataaaggagatgggtgagatgcatagggaactcaatgca

SEQ ID NO: 235 - protein, 333 aa, Artificial Sequence; identical to SEQ ID NO: 233
  tamarin 1-27 CD3 epsilon-EpCAM

SEQ ID NO: 236 - DNA, 1056 bp, Artificial Sequence; identical to SEQ ID NO: 234
  tamarin 1-27 CD3 epsilon-EpCAM

SEQ ID NO: 237 - protein, 333 aa, Artificial Sequence
  squirrel monkey 1-27 CD3 epsilon-EpCAM
QDGNEEIGDTTQNPYKVSISGTTVTLTDYKDDDDKTASFAAAQKECVCENYKLAVNCFLNDNGQCQCTSIGAQNTVLCSKLAAKCLVMKAEMNGSKLGRRAKPEGALQNNDGLYDPDCDESGLFKAKQCNGTSTCWCVNTAGVRRTDKDTEITCSERVRTYWIIIELKHKAREKPYDVQSLRTALEEAIKTRYQLDPKFITNILYEDNVITIDLVQNSSQKTQNDVDIADVAYYFEKDVKGESLFHSKKMDLRVNGEQLDLDPGQTLIYYVDEKAPEFSMQGLKAGVIAVIVVVVIAIVAGIVVLVISRKKRMAKYEKAEIKEMGEMHRELNA

SEQ ID NO: 238 - DNA, 1056 bp, Artificial Sequence
  squirrel monkey 1-27 CD3 epsilon-EpCAM
atgggatggagctgtatcatcctcttcttggtagcaacagctacaggtgtacactcccaggacggtaatgaagagattggtgatactacccagaacccatataaagtttccatctcaggaaccacagtaacactgacagattacaaggacgacgatgacaagactgcgagttttgccgcagctcagaaagaatgtgtctgtgaaaactacaagctggccgtaaactgctttttgaatgacaatggtcaatgccagtgtacttcgattggtgcacaaaatactgtcctttgctcaaagctggctgccaaatgtttggtgatgaaggcagaaatgaacggctcaaaacttgggagaagagcgaaacctgaaggggctctccagaacaatgatggcctttacgatcctgactgcgatgagagcgggctctttaaggccaagcagtgcaacggcacctccacgtgctggtgtgtgaacactgctggggtcagaagaactgacaaggacactgaaataacctgctctgagcgagtgagaacctactggatcatcattgaattaaaacacaaagcaagagaaaaaccttatgatgttcaaagtttgcggactgcacttgaggaggcgatcaaaacgcgttatcaactggatccaaaatttatcacaaatattttgtatgaggataatgttatcactattgatctggttcaaaattcttctcagaaaactcagaatgatgtggacatagctgatgtggcttattattttgaaaaagatgttaaaggtgaatccttgtttcattctaagaaaatggacctgagagtaaatggggaacaactggatctggatcctggtcaaactttaatttattatgtcgatgaaaaagcacctgaattctcaatgcagggtctaaaagctggtgttattgctgttattgtggttgtggtgatagcaattgttgctggaattgttgtgctggttatttccagaaagaagagaatggcaaagtatgagaaggctgagataaaggagatgggtgagatgcatagggaactcaatgca

SEQ ID NO: 239 - protein, 333 aa, Artificial Sequence
  swine 1-27 CD3 epsilon-EpCAM
QEDIERPDEDTQKTFKVSISGDKVELTDYKDDDDKTASFAAAQKECVCENYKLAVNCFLNDNGQCQCTSIGAQNTVLCSKLAAKCLVMKAEMNGSKLGRRAKPEGALQNNDGLYDPDCDESGLFKAKQCNGTSTCWCVNTAGVRRTDKDTEITCSERVRTYWIIIELKHKAREKPYDVQSLRTALEEAIKTRYQLDPKFITNILYEDNVITIDLVQNSSQKTQNDVDIADVAYYFEKDVKGESLFHSKKMDLRVNGEQLDLDPGQTLIYYVDEKAPEFSMQGLKAGVIAVIVVVVIAIVAGIVVLVISRKKRMAKYEKAEIKEMGEMHRELNA

SEQ ID NO: 240 - DNA, 1056 bp, Artificial Sequence
  swine 1-27 CD3 epsilon-EpCAM
atgggatggagctgtatcatcctcttcttggtagcaacagctacaggtgtacactcccaagaagacattgaaagaccagatgaagatacacagaaaacatttaaagtctccatctctggagacaaagtagagctgacagattacaaggacgacgatgacaagactgcgagttttgccgcagctcagaaagaatgtgtctgtgaaaactacaagctggccgtaaactgctttttgaatgacaatggtcaatgccagtgtacttcgattggtgcacaaaatactgtcctttgctcaaagctggctgccaaatgtttggtgatgaaggcagaaatgaacggctcaaaacttgggagaagagcgaaacctgaaggggctctccagaacaatgatggcctttacgatcctgactgcgatgagagcgggctctttaaggccaagcagtgcaacggcacctccacgtgctggtgtgtgaacactgctggggtcagaagaactgacaaggacactgaaataacctgctctgagcgagtgagaacctactggatcatcattgaattaaaacacaaagcaagagaaaaaccttatgatgttcaaagtttgcggactgcacttgaggaggcgatcaaaacgcgttatcaactggatccaaaatttatcacaaatattttgtatgaggataatgttatcactattgatctggttcaaaattcttctcagaaaactcagaatgatgtggacatagctgatgtggcttattattttgaaaaagatgttaaaggtgaatccttgtttcattctaagaaaatggacctgagagtaaatggggaacaactggatctggatcctggtcaaactttaatttattatgtcgatgaaaaagcacctgaattctcaatgcagggtctaaaagctggtgttattgctgttattgtggttgtggtgatagcaattgttgctggaattgttgtgctggttatttccagaaagaagagaatggcaaagtatgagaaggctgagataaaggagatgggtgagatgcatagggaactcaatgca

SEQ ID NO: 241 - protein, 186 aa, Homo sapiens
QDGNEEMGGITQTPYKVSISGTTVILTCPQYPGSEILWQHNDKNIGGDEDDKNIGSDEDHLSLKEFSELEQSGYYVCYPRGSKPEDANFYLYLRARVCENCMEMDVMSVATIVIVDICITGGLLLLVYYWSKNRKAKAKPVTRGAGAGGRQRGQNKERPPPVPNPDYEPIRKGQRDLYSGLNQRRI

SEQ ID NO: 242 - DNA, 621 bp, Homo sapiens
atgcagtcgggcactcactggagagttctgggcctctgcctcttatcagttggcgtttgggggcaagatggtaatgaagaaatgggtggtattacacagacaccatataaagtctccatctctggaaccacagtaatattgacatgccctcagtatcctggatctgaaatactatggcaacacaatgataaaaacataggcggtgatgaggatgataaaaacataggcagtgatgaggatcacctgtcactgaaggaattttcagaattggagcaaagtggttattatgtctgctaccccagaggaagcaaaccagaagatgcgaacttttatctctacctgagggcacgcgtgtgtgagaactgcatggagatggatgtgatgtcggtggccacaattgtcatagtggacatctgcatcactgggggcttgctgctgctggtttactactggagcaagaatagaaaggccaaggccaagcctgtgacacgaggagcgggtgctggcggcaggcaaaggggacaaaacaaggagaggccaccacctgttcccaacccagactatgagcccatccggaaaggccagcgggacctgtattctggcctgaatcagagacgcatc

SEQ ID NO: 243 - protein, 19 aa, Artificial Sequence
  19 amino acid immunoglobulin leader peptide
MGWSCIILFLVATATGVHS

SEQ ID NO: 244 - DNA, 57 bp, Artificial Sequence
  19 amino acid immunoglobulin leader peptide coding sequence
atgggatggagctgtatcatcctcttcttggtagcaacagctacaggtgtacactcc

SEQ ID NO: 245 - protein, 324 aa, Mus musculus
AKTTPPSVYPLAPGSAAQTNSMVTLGCLVKGYFPEPVTVTWNSGSLSSGVHTFPAVLQSDLYTLSSSVTVPSSTWPSETVTCNVAHPASSTKVDKKIVPRDCGCKPCICTVPEVSSVFIFPPKPKDVLTITLTPKVTCVVVDISKDDPEVQFSWFVDDVEVHTAQTQPREEQFNSTFRSVSELPIMHQDWLNGKEFKCRVNSAAFPAPIEKTISKTKGRPKAPQVYTIPPPKEQMAKDKVSLTCMITDFFPEDITVEWQWNGQPAENYKNTQPIMDTDGSYFVYSKLNVQKSNWEAGNTFTCSVLHEGLHNHHTEKSLSHSPGK

SEQ ID NO: 246 - DNA, 972 bp, Mus musculus
gccaaaacgacacccccatctgtctatccactggcccctggatctgctgcccaaactaactccatggtgaccctgggatgcctggtcaagggctatttccctgagccagtgacagtgacctggaactctggatccctgtccagcggtgtgcacaccttcccagctgtcctgcagtctgacctctacactctgagcagctcagtgactgtcccctccagcacctggcccagcgagaccgtcacctgcaacgttgcccacccggccagcagcaccaaggtggacaagaaaattgtgcccagggattgtggttgtaagccttgcatatgtacagtcccagaagtatcatctgtcttcatcttccccccaaagcccaaggatgtgctcaccattactctgactcctaaggtcacgtgtgttgtggtagacatcagcaaggatgatcccgaggtccagttcagctggtttgtagatgatgtggaggtgcacacagctcagacgcaaccccgggaggagcagttcaacagcactttccgctcagtcagtgaacttcccatcatgcaccaggactggctcaatggcaaggagttcaaatgcagggtcaacagtgcagctttccctgcccccatcgagaaaaccatctccaaaaccaaaggcagaccgaaggctccacaggtgtacaccattccacctcccaaggagcagatggccaaggataaagtcagtctgacctgcatgataacagacttcttccctgaagacattactgtggagtggcagtggaatgggcagccagcggagaactacaagaacactcagcccatcatggacacagatggctcttacttcgtctacagcaagctcaatgtgcagaagagcaactgggaggcaggaaatactttcacctgctctgtgttacatgagggcctgcacaaccaccatactgagaagagcctctcccactctcctggtaaa

SEQ ID NO: 247 - protein, 106 aa, Homo sapiens
GQPKAAPSVTLFPPSSEELQANKATLVCLISDFYPGAVTVAWKADSSPVKAGVETTTPSKQSNNKYAASSYLSLTPEQWKSHKSYSCQVTHEGSTVEKTVAPTECS

SEQ ID NO: 248 - DNA, 318 bp, Homo sapiens
ggtcagcccaaggctgccccctcggtcactctgttcccaccctcctctgaggagcttcaagccaacaaggccacactggtgtgtctcataagtgacttctacccgggagccgtgacagtggcctggaaggcagatagcagccccgtcaaggcgggagtggagaccaccacaccctccaaacaaagcaacaacaagtacgcggccagcagctacctgagcctgacgcctgagcagtggaagtcccacaaaagctacagctgccaggtcacgcatgaagggagcaccgtggagaagacagtggcccctacagaatgttca

SEQ ID NO: 249 - protein, 800 aa, Homo sapiens
DYKDDDDKSRTRSGSQLDGGLVLFSHRGTLDGGFRFRLSDGEHTSPGHFFRVTAQKQVLLSLKGSQTLTVCPGSVQPLSSQTLRASSSAGTDPQLLLYRVVRGPQLGRLFHAQQDSTGEALVNFTQAEVYAGNILYEHEMPPEPFWEAHDTLELQLSSPPARDVAATLAVAVSFEAACPQRPSHLWKNKGLWVPEGQRARITVAALDASNLLASVPSPQRSEHDVLFQVTQFPSRGQLLVSEEPLHAGQPHFLQSQLAAGQLVYAHGGGGTQQDGFHFRAHLQGPAGASVAGPQTSEAFAITVRDVNERPPQPQASVPLRLTRGSRAPISRAQLSVVDPDSAPGEIEYEVQRAPHNGFLSLVGGGLGPVTRFTQADVDSGRLAFVANGSSVAGIFQLSMSDGASPPLPMSLAVDILPSAIEVQLRAPLEVPQALGRSSLSQQQLRVVSDREEPEAAYRLIQGPQYGHLLVGGRPTSAFSQFQIDQGEVVFAFTNSSSSHDHFRVLALARGVNASAVVNVTVRALLHVWAGGPWPQGATLRLDPTVLDAGELANRTDSVPRFRLLEGPRHGRVVRVPRARTEPGGSQLVEQFTQQDLEDGRLGLEVGRPEGRAPGPAGDSLTLELWAQGVPPAVASLDFATEPYNAARPYSVALLSVPEAARTEAGKPESSTPTGEPGPMASSPEPAVAKGGFLSFLEANMFSVIIPMCLVLLLLALILPLLFYLRKRNKTGKHDVQVLTAKPRNGLAGDTETFRKVEPGQAIPLTAVPGQGPPPGGQPDPELLQFCRTPNPALKNGQYWV

SEQ ID NO: 250 - DNA, 2457 bp, Homo sapiens
atgggatggagctgtatcatcctcttcttggtagcaacagctacaggtgtacactccgactacaaagacgatgacgacaagtcccgtacgagatctggatcccaattggacggcgggctcgtgctgttctcacacagaggaaccctggatggaggcttccgcttccgcctctctgacggcgagcacacttcccccggacacttcttccgagtgacggcccagaagcaagtgctcctctcgctgaagggcagccagacactgactgtctgcccagggtccgtccagccactcagcagtcagaccctcagggccagctccagcgcaggcactgacccccagctcctgctctaccgtgtggtgcggggcccccagctaggccggctgttccacgcccagcaggacagcacaggggaggccctggtgaacttcactcaggcagaggtctacgctgggaatattctgtatgagcatgagatgccccccgagcccttttgggaggcccatgataccctagagctccagctgtcctcgccgcctgcccgggacgtggccgccacccttgctgtggctgtgtcttttgaggctgcctgtccccagcgccccagccacctctggaagaacaaaggtctctgggtccccgagggccagcgggccaggatcaccgtggctgctctggatgcctccaatctcttggccagcgttccatcaccccagcgctcagagcatgatgtgctcttccaggtcacacagttccccagccgcggccagctgttggtgtccgaggagcccctccatgctgggcagccccacttcctgcagtcccagctggctgcagggcagctagtgtatgcccacggcggtgggggcacccagcaggatggcttccactttcgtgcccacctccaggggccagcaggggcctccgtggctggaccccaaacctcagaggcctttgccatcacggtgagggatgtaaatgagcggccccctcagccacaggcctctgtcccactccggctcacccgaggctctcgtgcccccatctcccgggcccagctgagtgtggtggacccagactcagctcctggggagattgagtacgaggtccagcgggcaccccacaacggcttcctcagcctggtgggtggtggcctggggcccgtgacccgcttcacgcaagccgatgtggattcagggcggctggccttcgtggccaacgggagcagcgtggcaggcatcttccagctgagcatgtctgatggggccagcccacccctgcccatgtccctggctgtggacatcctaccatccgccatcgaggtgcagctgcgggcacccctggaggtgccccaagctttggggcgctcctcactgagccagcagcagctccgggtggtttcagatcgggaggagccagaggcagcataccggttgatccagggaccccagtatgggcatctcctggtgggcgggcggcccacctcggccttcagccaattccagatagaccagggcgaggtggtctttgccttcaccaactcctcctcctctcatgaccacttcagagtcctggcactggctaggggtgtcaatgcatcagccgtagtgaacgtcactgtgagggctctgctgcatgtgtgggcaggtgggccatggccccagggtgccaccctgcgcctggaccccaccgtcctagatgctggcgagctggccaaccgcacagacagtgtgccgcgcttccgcctcctggagggaccccggcatggccgcgtggtccgcgtgccccgagccaggacggagcccgggggcagccagctggtggagcagttcactcagcaggaccttgaggacgggaggctggggctggaggtgggcaggccagaggggagggcccccggccccgcaggtgacagtctcactctggagctgtgggcacagggcgtcccgcctgctgtggcctccctggactttgccactgagccttacaatgctgcccggccctacagcgtggccctgctcagtgtccccgaggccgcccggacggaagcagggaagccagagagcagcacccccacaggcgagccaggccccatggcatccagccctgagcccgctgtggccaagggaggcttcctgagctttctagaggccaacatgttcagcgtcatcatccccatgtgcctggtacttctgctcctggcgctcatcctgcccctgctcttctacctccgaaaacgcaacaagacgggcaagcatgacgtccaggtcctgactgccaagccccgcaacggcctggctggtgacaccgagacctttcgcaaggtggagccaggccaggccatcccgctcacagctgtgcctggccaggggccccctccaggaggccagcctgacccagagctgctgcagttctgccggacacccaaccctgcccttaagaatggccagtactgggtg

SEQ ID NO: 251 - protein, 807 aa, Macaca fascicularis
  misc_feature (714)..(714): Xaa can be any naturally occurring amino acid
PSNGRVVLRAAPGTEVRSFTQAQLDGGLVLFSHRGTLDGGFRFGLSDGEHTSSGHFFRVTAQKQVLLSLEGSRTLTVCPGSVQPLSSQTLRASSSAGTDPQLLLYRVVRGPQLGRLFHAQQDSTGEALVNFTQAEVYAGNILYEHEMPTEPFWEAHDTLELQLSSPPARDVAATLAVAVSFEAACPQRPSHLWKNKGLWVPEGQRAKITMAALDASNLLASVPSSQRLEHDVLFQVTQFPSRGQLLVSEEPLHAGQPHFLQSQLAAGQLVYAHGGGGTQQDGFHFRAHLQGPAGATVAGPQTSEAFAITVRDVNERPPQPQASVPLRITRGSRAPISRAQLSVVDPDSAPGEIEYEVQRAPHNGFLSLVGGGPGPVNRFTQADVDSGRLAFVANGSSVAGVFQLSMSDGASPPLPMSLAVDILPSAIEVQLQAPLEVPQALGRSSLSQQQLRVVSDREEPEAAYRLIQGPKYGHLLVGGQPASAFSQLQIDQGEVVFAFTNFSSSHDHFRVLALARGVNASAVVNITVRALLHVWAGGPWPQGATLRLDPTILDAGELANRTGSVPRFRLLEGPRHGRVVRVPRARMEPGGSQLVEQFTQQDLEDGRLGLEVGRPEGRAPSPTGDSLTLELWAQGVPPAVASLDFATEPYNAARPYSVALLSVPEATRTEAGKPESSTPTGEPGPMASSPVPAVAKGGFLGFLEANMFSVIIPXCLVLLLLALILPLLFYLRKRNKTGKHDVQVLTAKPRNGLAGDTETFRKVEPGQAIPLTAVPGQGPPPGGQPDPELLQFCRTPNPALKNGQYWV

SEQ ID NO: 252 - DNA, 2421 bp, Macaca fascicularis
cccagcaacggacgggtagtgctgcgggcggcgccgggcaccgaggtgcgcagcttcacgcaggcccagctggatggcggactcgtgctgttctcacacagaggaaccctggatggaggcttccgcttcggcctctccgatggcgagcacacttcctctggacacttcttccgagtgacggcccagaagcaagtgctcctctcgctggagggcagccggacactgactgtctgcccagggtccgtgcagccactcagcagtcagaccctcagagccagctccagcgcaggcaccgacccccagctcctgctctaccgtgtggtgcggggcccccagctaggccggctgttccatgcccagcaggacagcacaggggaggccctggtgaacttcactcaggcagaggtctatgctgggaatattctgtatgagcatgagatgcccaccgagcccttctgggaggcccatgataccctagagctccagctgtcctcaccacctgcccgggacgtggctgccacccttgctgtggctgtgtcttttgaggctgcctgtccccagcgccccagccacctctggaagaacaaaggtctctgggtccccgagggccagcgggccaagatcaccatggctgccctggatgcctccaacctcttggccagcgttccatcatcccagcgcctagagcatgatgtgctcttccaggtcacgcagttccccagccggggccagctattggtgtctgaggagcccctccacgctgggcagccccacttcctgcagtcccagctggctgcagggcagctagtgtatgcccacggcggtgggggtacccaacaggatggcttccactttcgtgcccacctccaggggccagcaggggccaccgtggctggaccccaaacctcagaggcttttgccatcacggtgcgggatgtaaatgagcggccccctcagccacaggcctctgtcccactccggatcacccgaggctctcgagcccccatctcccgggcccagctgagtgtcgtggacccagactcagctcctggggagattgagtatgaggtccagcgggcaccccacaacggcttcctcagcctggtgggtggtggcccggggcccgtgaaccgcttcacgcaagccgatgtggattcggggcggctggccttcgtggccaacgggagcagcgtagcaggcgtcttccagctgagcatgtctgatggggccagcccaccgctgcccatgtccctggccgtggacatcctaccatccgccatcgaggtgcagctgcaggcacccctggaggtgccccaagctttggggcgctcctcactgagccagcagcagctccgggtggtttcagatagggaggagccagaggcagcataccgcctcatccagggaccaaagtacgggcatctcctggtgggtgggcagcccgcctcggccttcagccaactccagatagaccagggcgaggtggtctttgccttcaccaacttctcctcctctcatgaccacttcagagtcctggcactggctaggggtgtcaacgcatcagccgtagtgaacatcactgtgagggctctgctgcacgtgtgggcaggtgggccatggccccagggtgctaccctgcgcctggacccaaccatcctagatgctggcgagctggccaaccgcacaggcagtgtgccccgcttccgcctcctggagggaccccggcatggccgcgtggtccgtgtgccccgagccaggatggagcctgggggcagccagctggtggagcagttcactcagcaggaccttgaggatgggaggctggggctggaggtgggcaggccagagggaagggcccccagccccacaggcgacagtctcactctggagctgtgggcacagggcgtcccacctgctgtggcctccctggactttgccactgagccttacaatgctgcccggccctacagcgtggccctgctcagtgtccccgaggccacccggacggaagcagggaagccagagagcagcacccccacaggcgagccaggccccatggcatctagccctgtgcctgctgtggccaagggaggcttcctgggcttccttgaggccaacatgttcagtgtcatcatccccrtgtgcctggtccttctgctcctggcgctcatcttgcccctgctcttctacctccgaaaacgcaacaagacgggcaagcatgacgtccaggtcctgactgccaagccccgcaatggtctggctggtgacactgagacctttcgcaaggtggagccaggccaggccatcccgctcacagctgtgcctggccaggggccccctccgggaggccagcctgacccagagctgctgcagttctgccggacacccaaccctgcccttaagaatggccagtactgggtg

SEQ ID NO: 253 - DNA, 18 bp, Artificial Sequence
  PCR primer for CD3 epsilon chain - forward primer
agagttctgggcctctgc

SEQ ID NO: 254 - DNA, 19 bp, Artificial Sequence
  PCR primer for CD3 epsilon chain - reverse primer
cggatgggctcatagtctg

SEQ ID NO: 255 - protein, 192 aa, Artificial Sequence
  His6-human CD3 epsilon
HHHHHHQDGNEEMGGITQTPYKVSISGTTVILTCPQYPGSEILWQHNDKNIGGDEDDKNIGSDEDHLSLKEFSELEQSGYYVCYPRGSKPEDANFYLYLRARVCENCMEMDVMSVATIVIVDICITGGLLLLVYYWSKNRKAKAKPVTRGAGAGGRQRGQNKERPPPVPNPDYEPIRKGQRDLYSGLNQRRI

SEQ ID NO: 256 - DNA, 633 bp, Artificial Sequence
  His6-human CD3 epsilon
atgggatggagctgtatcatcctcttcttggtagcaacagctacaggtgtacactcccatcatcaccatcatcatcaagatggtaatgaagaaatgggtggtattacacagacaccatataaagtctccatctctggaaccacagtaatattgacatgccctcagtatcctggatctgaaatactatggcaacacaatgataaaaacataggcggtgatgaggatgataaaaacataggcagtgatgaggatcacctgtcactgaaggaattttcagaattggagcaaagtggttattatgtctgctaccccagaggaagcaaaccagaagatgcgaacttttatctctacctgagggcacgcgtgtgtgagaactgcatggagatggatgtgatgtcggtggccacaattgtcatagtggacatctgcatcactgggggcttgctgctgctggtttactactggagcaagaatagaaaggccaaggccaagcctgtgacacgaggagcgggtgctggcggcaggcaaaggggacaaaacaaggagaggccaccacctgttcccaacccagactatgagcccatccggaaaggccagcgggacctgtattctggcctgaatcagagacgcatc

SEQ ID NO: 257 - protein, 505 aa, Artificial Sequence
  CD33 AH3 HL x H2C HL
QVQLVQSGAEVKKPGESVKVSCKASGYTFTNYGMNWVRQAPGQGLEWMGWINTYTGEPTYADDFKGRVTMSSDTSTSTAYLEINSLRSDDTAIYYCARWSWSDGYYVYFDYWGQGTTVTVSSGGGGSGGGGSGGGGSDIVMTQSPDSLTVSLGERTTINCKSSQSVLDSSKNKNSLAWYQQKPGQPPKLLLSWASTRESGIPDRFSGSGSGTDFTLTIDSLQPEDSATYYCQQSAHFPITFGQGTRLEIKSGGGGSEVQLVESGGGLVQPGGSLKLSCAASGFTFNKYAMNWVRQAPGKGLEWVARIRSKYNNYATYYADSVKDRFTISRDDSKNTAYLQMNNLKTEDTAVYYCVRHGNFGNSYISYWAYWGQGTLVTVSSGGGGSGGGGSGGGGSQTVVTQEPSLTVSPGGTVTLTCGSSTGAVTSGYYPNWVQQKPGQAPRGLIGGTKFLAPGTPARFSGSLLGGKAALTLSGVQPEDEAEYYCALWYSNRWVFGGGTKLTVL

SEQ ID NO: 258 - DNA, 1515 bp, Artificial Sequence
  CD33 AH3 HL x H2C HL
caggtgcagctggtgcagtctggagctgaggtgaaaaagcctggagagtcagtcaaggtctcctgcaaggctagcgggtataccttcacaaactatggaatgaactgggtgaggcaggctccaggacagggtttagagtggatgggctggataaacacctacactggagagccaacatatgctgatgacttcaagggacgggttaccatgtcttcggatacctctaccagcactgcctatttggaaatcaacagcctcagaagtgatgacacggctatatattactgtgcgcgctggagttggagtgatggttactacgtttactttgactactggggccaaggcactacggtcaccgtctcctcaggtggtggtggttctggcggcggcggctccggtggtggtggttctgacatcgtgatgacacagtctccagactccctgactgtgtctctgggcgagaggaccaccatcaactgcaagtccagccagagtgttttagacagctccaagaataagaactccttagcttggtaccagcagaaaccaggacagcctcctaaattactcctttcctgggcatctacgcgggaatccgggatccctgaccgattcagtggcagcgggtctgggacagatttcactctcactattgacagcctgcagcctgaagattctgcaacttactattgtcaacagtctgcccacttcccgatcacctttggccaagggacacgactggagattaaatccggaggtggtggctccgaggtgcagctggtcgagtctggaggaggattggtgcagcctggagggtcattgaaactctcatgtgcagcctctggattcaccttcaataagtacgccatgaactgggtccgccaggctccaggaaagggtttggaatgggttgctcgcataagaagtaaatataataattatgcaacatattatgccgattcagtgaaagacaggttcaccatctccagagatgattcaaaaaacactgcctatctacaaatgaacaacttgaaaactgaggacactgccgtgtactactgtgtgagacatgggaacttcggtaatagctacatatcctactgggcttactggggccaagggactctggtcaccgtctcctcaggtggtggtggttctggcggcggcggctccggtggtggtggttctcagactgttgtgactcaggaaccttcactcaccgtatcacctggtggaacagtcacactcacttgtggctcctcgactggggctgttacatctggctactacccaaactgggtccaacaaaaaccaggtcaggcaccccgtggtctaataggtgggactaagttcctcgcccccggtactcctgccagattctcaggctccctgcttggaggcaaggctgccctcaccctctcaggggtacagccagaggatgaggcagaatattactgtgctctatggtacagcaaccgctgggtgttcggtggaggaaccaaactgactgtccta

SEQ ID NO: 259 - protein, 505 aa, Artificial Sequence
  CD33 AH3 HL x F12Q HL
QVQLVQSGAEVKKPGESVKVSCKASGYTFTNYGMNWVRQAPGQGLEWMGWINTYTGEPTYADDFKGRVTMSSDTSTSTAYLEINSLRSDDTAIYYCARWSWSDGYYVYFDYWGQGTTVTVSSGGGGSGGGGSGGGGSDIVMTQSPDSLTVSLGERTTINCKSSQSVLDSSKNKNSLAWYQQKPGQPPKLLLSWASTRESGIPDRFSGSGSGTDFTLTIDSLQPEDSATYYCQQSAHFPITFGQGTRLEIKSGGGGSEVQLVESGGGLVQPGGSLKLSCAASGFTFNSYAMNWVRQAPGKGLEWVARIRSKYNNYATYYADSVKGRFTISRDDSKNTAYLQMNNLKTEDTAVYYCVRHGNFGNSYVSWWAYWGQGTLVTVSSGGGGSGGGGSGGGGSQTVVTQEPSLTVSPGGTVTLTCGSSTGAVTSGNYPNWVQQKPGQAPRGLIGGTKFLAPGTPARFSGSLLGGKAALTLSGVQPEDEAEYYCVLWYSNRWVFGGGTKLTVL

SEQ ID NO: 260 - DNA, 1515 bp, Artificial Sequence
  CD33 AH3 HL x F12Q HL
caggtgcagctggtgcagtctggagctgaggtgaaaaagcctggagagtcagtcaaggtctcctgcaaggctagcgggtataccttcacaaactatggaatgaactgggtgaggcaggctccaggacagggtttagagtggatgggctggataaacacctacactggagagccaacatatgctgatgacttcaagggacgggttaccatgtcttcggatacctctaccagcactgcctatttggaaatcaacagcctcagaagtgatgacacggctatatattactgtgcgcgctggagttggagtgatggttactacgtttactttgactactggggccaaggcactacggtcaccgtctcctcaggtggtggtggttctggcggcggcggctccggtggtggtggttctgacatcgtgatgacacagtctccagactccctgactgtgtctctgggcgagaggaccaccatcaactgcaagtccagccagagtgttttagacagctccaagaataagaactccttagcttggtaccagcagaaaccaggacagcctcctaaattactcctttcctgggcatctacgcgggaatccgggatccctgaccgattcagtggcagcgggtctgggacagatttcactctcactattgacagcctgcagcctgaagattctgcaacttactattgtcaacagtctgcccacttcccgatcacctttggccaagggacacgactggagattaaatccggaggtggtggctccgaggtgcagctggtcgagtctggaggaggattggtgcagcctggagggtcattgaaactctcatgtgcagcctctggattcaccttcaatagctacgccatgaactgggtccgccaggctccaggaaagggtttggaatgggttgctcgcataagaagtaaatataataattatgcaacatattatgccgattcagtgaaaggcaggttcaccatctccagagatgattcaaaaaacactgcctatctacaaatgaacaacttgaaaactgaggacactgccgtgtactactgtgtgagacatgggaacttcggtaatagctacgtttcctggtgggcttactggggccaagggactctggtcaccgtctcctcaggtggtggtggttctggcggcggcggctccggtggtggtggttctcagactgttgtgactcaggaaccttcactcaccgtatcacctggtggaacagtcacactcacttgtggctcctcgactggggctgttacatctggcaactacccaaactgggtccaacaaaaaccaggtcaggcaccccgtggtctaataggtgggactaagttcctcgcccccggtactcctgccagattctcaggctccctgcttggaggcaaggctgccctcaccctctcaggggtacagccagaggatgaggcagaatattactgtgttctatggtacagcaaccgctgggtgttcggtggaggaaccaaactgactgtccta

SEQ ID NO: 261 - protein, 505 aa, Artificial Sequence
  CD33 AH3 HL x I2C HL
QVQLVQSGAEVKKPGESVKVSCKASGYTFTNYGMNWVRQAPGQGLEWMGWINTYTGEPTYADDFKGRVTMSSDTSTSTAYLEINSLRSDDTAIYYCARWSWSDGYYVYFDYWGQGTTVTVSSGGGGSGGGGSGGGGSDIVMTQSPDSLTVSLGERTTINCKSSQSVLDSSKNKNSLAWYQQKPGQPPKLLLSWASTRESGIPDRFSGSGSGTDFTLTIDSLQPEDSATYYCQQSAHFPITFGQGTRLEIKSGGGGSEVQLVESGGGLVQPGGSLKLSCAASGFTFNKYAMNWVRQAPGKGLEWVARIRSKYNNYATYYADSVKDRFTISRDDSKNTAYLQMNNLKTEDTAVYYCVRHGNFGNSYISYWAYWGQGTLVTVSSGGGGSGGGGSGGGGSQTVVTQEPSLTVSPGGTVTLTCGSSTGAVTSGNYPNWVQQKPGQAPRGLIGGTKFLAPGTPARFSGSLLGGKAALTLSGVQPEDEAEYYCVLWYSNRWVFGGGTKLTVL

SEQ ID NO: 262 - DNA, 1515 bp, Artificial Sequence
  CD33 AH3 HL x I2C HL
caggtgcagctggtgcagtctggagctgaggtgaaaaagcctggagagtcagtcaaggtctcctgcaaggctagcgggtataccttcacaaactatggaatgaactgggtgaggcaggctccaggacagggtttagagtggatgggctggataaacacctacactggagagccaacatatgctgatgacttcaagggacgggttaccatgtcttcggatacctctaccagcactgcctatttggaaatcaacagcctcagaagtgatgacacggctatatattactgtgcgcgctggagttggagtgatggttactacgtttactttgactactggggccaaggcactacggtcaccgtctcctcaggtggtggtggttctggcggcggcggctccggtggtggtggttctgacatcgtgatgacacagtctccagactccctgactgtgtctctgggcgagaggaccaccatcaactgcaagtccagccagagtgttttagacagctccaagaataagaactccttagcttggtaccagcagaaaccaggacagcctcctaaattactcctttcctgggcatctacgcgggaatccgggatccctgaccgattcagtggcagcgggtctgggacagatttcactctcactattgacagcctgcagcctgaagattctgcaacttactattgtcaacagtctgcccacttcccgatcacctttggccaagggacacgactggagattaaatccggaggtggtggctccgaggtgcagctggtcgagtctggaggaggattggtgcagcctggagggtcattgaaactctcatgtgcagcctctggattcaccttcaataagtacgccatgaactgggtccgccaggctccaggaaagggtttggaatgggttgctcgcataagaagtaaatataataattatgcaacatattatgccgattcagtgaaagacaggttcaccatctccagagatgattcaaaaaacactgcctatctacaaatgaacaacttgaaaactgaggacactgccgtgtactactgtgtgagacatgggaacttcggtaatagctacatatcctactgggcttactggggccaagggactctggtcaccgtctcctcaggtggtggtggttctggcggcggcggctccggtggtggtggttctcagactgttgtgactcaggaaccttcactcaccgtatcacctggtggaacagtcacactcacttgtggctcctcgactggggctgttacatctggcaactacccaaactgggtccaacaaaaaccaggtcaggcaccccgtggtctaataggtgggactaagttcctcgcccccggtactcctgccagattctcaggctccctgcttggaggcaaggctgccctcaccctctcaggggtacagccagaggatgaggcagaatattactgtgttctatggtacagcaaccgctgggtgttcggtggaggaaccaaactgactgtccta

SEQ ID NO: 263 - protein, 505 aa, Artificial Sequence
  CD33 AF5 HL x H2C HL
QVQLVQSGAEVKKPGASVKVSCKASGYTFTNYGMNWVKQAPGQGLKWMGWINTYTGEPTYADDFKGRVTMTSDTSTSTAYLELHNLRSDDTAVYYCARWSWSDGYYVYFDYWGQGTTVTVSSGGGGSGGGGSGGGGSDIVMTQSPDSLTVSLGERTTINCKSSQSVLDSSKNKNSLAWYQQKPGQPPKLLLSWASTRESGIPDRFSGSGSGTDFTLTIDSLQPEDSATYYCQQSAHFPITFGQGTRLEIKSGGGGSEVQLVESGGGLVQPGGSLKLSCAASGFTFNKYAMNWVRQAPGKGLEWVARIRSKYNNYATYYADSVKDRFTISRDDSKNTAYLQMNNLKTEDTAVYYCVRHGNFGNSYISYWAYWGQGTLVTVSSGGGGSGGGGSGGGGSQTVVTQEPSLTVSPGGTVTLTCGSSTGAVTSGYYPNWVQQKPGQAPRGLIGGTKFLAPGTPARFSGSLLGGKAALTLSGVQPEDEAEYYCALWYSNRWVFGGGTKLTVL

SEQ ID NO: 264 - DNA, 1515 bp, Artificial Sequence
  CD33 AF5 HL x H2C HL
caggtgcagctggtgcagtctggagctgaggtgaagaagcctggagcgtcagtcaaggtctcctgcaaggctagcgggtataccttcacaaactatggaatgaactgggtgaagcaggctccaggacagggtttaaagtggatgggctggataaacacctacactggagagccaacatatgctgatgacttcaagggacgggttaccatgacttcggatacctctaccagcactgcctatttggaactccacaacctcagaagtgatgacacggctgtatattactgtgcgcgctggagttggagtgatggttactacgtttactttgactactggggccaaggcactacggtcaccgtctcctcaggtggtggtggttctggcggcggcggctccggtggtggtggttctgacatcgtgatgacacagtctccagactccctgactgtgtctctgggcgagaggaccaccatcaactgcaagtccagccagagtgttttagacagctccaagaataagaactccttagcttggtaccagcagaaaccaggacagcctcctaaattactcctttcctgggcatctacgcgggaatccgggatccctgaccgattcagtggcagcgggtctgggacagatttcactctcactattgacagcctgcagcctgaagattctgcaacttactattgtcaacagtctgcccacttcccgatcacctttggccaagggacacgactggagattaaatccggaggtggtggctccgaggtgcagctggtcgagtctggaggaggattggtgcagcctggagggtcattgaaactctcatgtgcagcctctggattcaccttcaataagtacgccatgaactgggtccgccaggctccaggaaagggtttggaatgggttgctcgcataagaagtaaatataataattatgcaacatattatgccgattcagtgaaagacaggttcaccatctccagagatgattcaaaaaacactgcctatctacaaatgaacaacttgaaaactgaggacactgccgtgtactactgtgtgagacatgggaacttcggtaatagctacatatcctactgggcttactggggccaagggactctggtcaccgtctcctcaggtggtggtggttctggcggcggcggctccggtggtggtggttctcagactgttgtgactcaggaaccttcactcaccgtatcacctggtggaacagtcacactcacttgtggctcctcgactggggctgttacatctggctactacccaaactgggtccaacaaaaaccaggtcaggcaccccgtggtctaataggtgggactaagttcctcgcccccggtactcctgccagattctcaggctccctgcttggaggcaaggctgccctcaccctctcaggggtacagccagaggatgaggcagaatattactgtgctctatggtacagcaaccgctgggtgttcggtggaggaaccaaactgactgtccta

SEQ ID NO: 265 - protein, 505 aa, Artificial Sequence
  CD33 AF5 HL x F12Q HL
QVQLVQSGAEVKKPGASVKVSCKASGYTFTNYGMNWVKQAPGQGLKWMGWINTYTGEPTYADDFKGRVTMTSDTSTSTAYLELHNLRSDDTAVYYCARWSWSDGYYVYFDYWGQGTTVTVSSGGGGSGGGGSGGGGSDIVMTQSPDSLTVSLGERTTINCKSSQSVLDSSKNKNSLAWYQQKPGQPPKLLLSWASTRESGIPDRFSGSGSGTDFTLTIDSLQPEDSATYYCQQSAHFPITFGQGTRLEIKSGGGGSEVQLVESGGGLVQPGGSLKLSCAASGFTFNSYAMNWVRQAPGKGLEWVARIRSKYNNYATYYADSVKGRFTISRDDSKNTAYLQMNNLKTEDTAVYYCVRHGNFGNSYVSWWAYWGQGTLVTVSSGGGGSGGGGSGGGGSQTVVTQEPSLTVSPGGTVTLTCGSSTGAVTSGNYPNWVQQKPGQAPRGLIGGTKFLAPGTPARFSGSLLGGKAALTLSGVQPEDEAEYYCVLWYSNRWVFGGGTKLTVL

SEQ ID NO: 266 - DNA, 1515 bp, Artificial Sequence
  CD33 AF5 HL x F12Q HL
caggtgcagctggtgcagtctggagctgaggtgaagaagcctggagcgtcagtcaaggtctcctgcaaggctagcgggtataccttcacaaactatggaatgaactgggtgaagcaggctccaggacagggtttaaagtggatgggctggataaacacctacactggagagccaacatatgctgatgacttcaagggacgggttaccatgacttcggatacctctaccagcactgcctatttggaactccacaacctcagaagtgatgacacggctgtatattactgtgcgcgctggagttggagtgatggttactacgtttactttgactactggggccaaggcactacggtcaccgtctcctcaggtggtggtggttctggcggcggcggctccggtggtggtggttctgacatcgtgatgacacagtctccagactccctgactgtgtctctgggcgagaggaccaccatcaactgcaagtccagccagagtgttttagacagctccaagaataagaactccttagcttggtaccagcagaaaccaggacagcctcctaaattactcctttcctgggcatctacgcgggaatccgggatccctgaccgattcagtggcagcgggtctgggacagatttcactctcactattgacagcctgcagcctgaagattctgcaacttactattgtcaacagtctgcccacttcccgatcacctttggccaagggacacgactggagattaaatccggaggtggtggctccgaggtgcagctggtcgagtctggaggaggattggtgcagcctggagggtcattgaaactctcatgtgcagcctctggattcaccttcaatagctacgccatgaactgggtccgccaggctccaggaaagggtttggaatgggttgctcgcataagaagtaaatataataattatgcaacatattatgccgattcagtgaaaggcaggttcaccatctccagagatgattcaaaaaacactgcctatctacaaatgaacaacttgaaaactgaggacactgccgtgtactactgtgtgagacatgggaacttcggtaatagctacgtttcctggtgggcttactggggccaagggactctggtcaccgtctcctcaggtggtggtggttctggcggcggcggctccggtggtggtggttctcagactgttgtgactcaggaaccttcactcaccgtatcacctggtggaacagtcacactcacttgtggctcctcgactggggctgttacatctggcaactacccaaactgggtccaacaaaaaccaggtcaggcaccccgtggtctaataggtgggactaagttcctcgcccccggtactcctgccagattctcaggctccctgcttggaggcaaggctgccctcaccctctcaggggtacagccagaggatgaggcagaatattactgtgttctatggtacagcaaccgctgggtgttcggtggaggaaccaaactgactgtccta

SEQ ID NO: 267 - protein, 505 aa, Artificial Sequence
  CD33 AF5 HL x I2C HL
QVQLVQSGAEVKKPGASVKVSCKASGYTFTNYGMNWVKQAPGQGLKWMGWINTYTGEPTYADDFKGRVTMTSDTSTSTAYLELHNLRSDDTAVYYCARWSWSDGYYVYFDYWGQGTTVTVSSGGGGSGGGGSGGGGSDIVMTQSPDSLTVSLGERTTINCKSSQSVLDSSKNKNSLAWYQQKPGQPPKLLLSWASTRESGIPDRFSGSGSGTDFTLTIDSLQPEDSATYYCQQSAHFPITFGQGTRLEIKSGGGGSEVQLVESGGGLVQPGGSLKLSCAASGFTFNKYAMNWVRQAPGKGLEWVARIRSKYNNYATYYADSVKDRFTISRDDSKNTAYLQMNNLKTEDTAVYYCVRHGNFGNSYISYWAYWGQGTLVTVSSGGGGSGGGGSGGGGSQTVVTQEPSLTVSPGGTVTLTCGSSTGAVTSGNYPNWVQQKPGQAPRGLIGGTKFLAPGTPARFSGSLLGGKAALTLSGVQPEDEAEYYCVLWYSNRWVFGGGTKLTVL

SEQ ID NO: 268 - DNA, 1515 bp, Artificial Sequence
  CD33 AF5 HL x I2C HL
caggtgcagctggtgcagtctggagctgaggtgaagaagcctggagcgtcagtcaaggtctcctgcaaggctagcgggtataccttcacaaactatggaatgaactgggtgaagcaggctccaggacagggtttaaagtggatgggctggataaacacctacactggagagccaacatatgctgatgacttcaagggacgggttaccatgacttcggatacctctaccagcactgcctatttggaactccacaacctcagaagtgatgacacggctgtatattactgtgcgcgctggagttggagtgatggttactacgtttactttgactactggggccaaggcactacggtcaccgtctcctcaggtggtggtggttctggcggcggcggctccggtggtggtggttctgacatcgtgatgacacagtctccagactccctgactgtgtctctgggcgagaggaccaccatcaactgcaagtccagccagagtgttttagacagctccaagaataagaactccttagcttggtaccagcagaaaccaggacagcctcctaaattactcctttcctgggcatctacgcgggaatccgggatccctgaccgattcagtggcagcgggtctgggacagatttcactctcactattgacagcctgcagcctgaagattctgcaacttactattgtcaacagtctgcccacttcccgatcacctttggccaagggacacgactggagattaaatccggaggtggtggctccgaggtgcagctggtcgagtctggaggaggattggtgcagcctggagggtcattgaaactctcatgtgcagcctctggattcaccttcaataagtacgccatgaactgggtccgccaggctccaggaaagggtttggaatgggttgctcgcataagaagtaaatataataattatgcaacatattatgccgattcagtgaaagacaggttcaccatctccagagatgattcaaaaaacactgcctatctacaaatgaacaacttgaaaactgaggacactgccgtgtactactgtgtgagacatgggaacttcggtaatagctacatatcctactgggcttactggggccaagggactctggtcaccgtctcctcaggtggtggtggttctggcggcggcggctccggtggtggtggttctcagactgttgtgactcaggaaccttcactcaccgtatcacctggtggaacagtcacactcacttgtggctcctcgactggggctgttacatctggcaactacccaaactgggtccaacaaaaaccaggtcaggcaccccgtggtctaataggtgggactaagttcctcgcccccggtactcctgccagattctcaggctccctgcttggaggcaaggctgccctcaccctctcaggggtacagccagaggatgaggcagaatattactgtgttctatggtacagcaaccgctgggtgttcggtggaggaaccaaactgactgtccta

SEQ ID NO: 269 - protein, 505 aa, Artificial Sequence
  CD33 AC8 HL x H2C HL
QVQLVQSGAEVKKPGESVKVSCKASGYTFTNYGMNWVKQAPGQGLKWMGWINTYTGEPTYADDFKGRVTMTTDTSTSTAYMEIRNLRNDDTAVYYCARWSWSDGYYVYFDYWGQGTTVTVSSGGGGSGGGGSGGGGSDIVMTQSPDSLTVSLGERTTINCKSSQSVLDSSKNKNSLAWYQQKPGQPPKLLLSWASTRESGIPDRFSGSGSGTDFTLTIDSLQPEDSATYYCQQSAHFPITFGQGTRLEIKSGGGGSEVQLVESGGGLVQPGGSLKLSCAASGFTFNKYAMNWVRQAPGKGLEWVARIRSKYNNYATYYADSVKDRFTISRDDSKNTAYLQMNNLKTEDTAVYYCVRHGNFGNSYISYWAYWGQGTLVTVSSGGGGSGGGGSGGGGSQTVVTQEPSLTVSPGGTVTLTCGSSTGAVTSGYYPNWVQQKPGQAPRGLIGGTKFLAPGTPARFSGSLLGGKAALTLSGVQPEDEAEYYCALWYSNRWVFGGGTKLTVL

SEQ ID NO: 270 - DNA, 1515 bp, Artificial Sequence
  CD33 AC8 HL x H2C HL
caggtgcagctggtgcagtctggagctgaggtgaagaagcctggagagtcagtcaaggtctcctgcaaggctagcgggtataccttcacaaactatggaatgaactgggtgaagcaggctccaggacagggtttaaagtggatgggctggataaacacctacactggagagccaacatatgctgatgacttcaagggacgggttaccatgactacggatacctctaccagcactgcctatatggaaatccgcaacctcagaaatgatgacacggctgtatattactgtgcgcgctggagttggagtgatggttactacgtttactttgactactggggccaaggcactacggtcaccgtctcctcaggtggtggtggttctggcggcggcggctccggtggtggtggttctgacatcgtgatgacacagtctccagactccctgactgtgtctctgggcgagaggaccaccatcaactgcaagtccagccagagtgttttagacagctccaagaataagaactccttagcttggtaccagcagaaaccaggacagcctcctaaattactcctttcctgggcatctacgcgggaatccgggatccctgaccgattcagtggcagcgggtctgggacagatttcactctcactattgacagcctgcagcctgaagattctgcaacttactattgtcaacagtctgcccacttcccgatcacctttggccaagggacacgactggagattaaatccggaggtggtggctccgaggtgcagctggtcgagtctggaggaggattggtgcagcctggagggtcattgaaactctcatgtgcagcctctggattcaccttcaataagtacgccatgaactgggtccgccaggctccaggaaagggtttggaatgggttgctcgcataagaagtaaatataataattatgcaacatattatgccgattcagtgaaagacaggttcaccatctccagagatgattcaaaaaacactgcctatctacaaatgaacaacttgaaaactgaggacactgccgtgtactactgtgtgagacatgggaacttcggtaatagctacatatcctactgggcttactggggccaagggactctggtcaccgtctcctcaggtggtggtggttctggcggcggcggctccggtggtggtggttctcagactgttgtgactcaggaaccttcactcaccgtatcacctggtggaacagtcacactcacttgtggctcctcgactggggctgttacatctggctactacccaaactgggtccaacaaaaaccaggtcaggcaccccgtggtctaataggtgggactaagttcctcgcccccggtactcctgccagattctcaggctccctgcttggaggcaaggctgccctcaccctctcaggggtacagccagaggatgaggcagaatattactgtgctctatggtacagcaaccgctgggtgttcggtggaggaaccaaactgactgtccta

SEQ ID NO: 271 - protein, 505 aa, Artificial Sequence
  CD33 AC8 HL x F12Q HL
QVQLVQSGAEVKKPGESVKVSCKASGYTFTNYGMNWVKQAPGQGLKWMGWINTYTGEPTYADDFKGRVTMTTDTSTSTAYMEIRNLRNDDTAVYYCARWSWSDGYYVYFDYWGQGTTVTVSSGGGGSGGGGSGGGGSDIVMTQSPDSLTVSLGERTTINCKSSQSVLDSSKNKNSLAWYQQKPGQPPKLLLSWASTRESGIPDRFSGSGSGTDFTLTIDSLQPEDSATYYCQQSAHFPITFGQGTRLEIKSGGGGSEVQLVESGGGLVQPGGSLKLSCAASGFTFNSYAMNWVRQAPGKGLEWVARIRSKYNNYATYYADSVKGRFTISRDDSKNTAYLQMNNLKTEDTAVYYCVRHGNFGNSYVSWWAYWGQGTLVTVSSGGGGSGGGGSGGGGSQTVVTQEPSLTVSPGGTVTLTCGSSTGAVTSGNYPNWVQQKPGQAPRGLIGGTKFLAPGTPARFSGSLLGGKAALTLSGVQPEDEAEYYCVLWYSNRWVFGGGTKLTVL

SEQ ID NO: 272 - DNA, 1515 bp, Artificial Sequence
  CD33 AC8 HL x F12Q HL
caggtgcagctggtgcagtctggagctgaggtgaagaagcctggagagtcagtcaaggtctcctgcaaggctagcgggtataccttcacaaactatggaatgaactgggtgaagcaggctccaggacagggtttaaagtggatgggctggataaacacctacactggagagccaacatatgctgatgacttcaagggacgggttaccatgactacggatacctctaccagcactgcctatatggaaatccgcaacctcagaaatgatgacacggctgtatattactgtgcgcgctggagttggagtgatggttactacgtttactttgactactggggccaaggcactacggtcaccgtctcctcaggtggtggtggttctggcggcggcggctccggtggtggtggttctgacatcgtgatgacacagtctccagactccctgactgtgtctctgggcgagaggaccaccatcaactgcaagtccagccagagtgttttagacagctccaagaataagaactccttagcttggtaccagcagaaaccaggacagcctcctaaattactcctttcctgggcatctacgcgggaatccgggatccctgaccgattcagtggcagcgggtctgggacagatttcactctcactattgacagcctgcagcctgaagattctgcaacttactattgtcaacagtctgcccacttcccgatcacctttggccaagggacacgactggagattaaatccggaggtggtggctccgaggtgcagctggtcgagtctggaggaggattggtgcagcctggagggtcattgaaactctcatgtgcagcctctggattcaccttcaatagctacgccatgaactgggtccgccaggctccaggaaagggtttggaatgggttgctcgcataagaagtaaatataataattatgcaacatattatgccgattcagtgaaaggcaggttcaccatctccagagatgattcaaaaaacactgcctatctacaaatgaacaacttgaaaactgaggacactgccgtgtactactgtgtgagacatgggaacttcggtaatagctacgtttcctggtgggcttactggggccaagggactctggtcaccgtctcctcaggtggtggtggttctggcggcggcggctccggtggtggtggttctcagactgttgtgactcaggaaccttcactcaccgtatcacctggtggaacagtcacactcacttgtggctcctcgactggggctgttacatctggcaactacccaaactgggtccaacaaaaaccaggtcaggcaccccgtggtctaataggtgggactaagttcctcgcccccggtactcctgccagattctcaggctccctgcttggaggcaaggctgccctcaccctctcaggggtacagccagaggatgaggcagaatattactgtgttctatggtacagcaaccgctgggtgttcggtggaggaaccaaactgactgtccta

SEQ ID NO: 273 - protein, 505 aa, Artificial Sequence
  CD33 AC8 HL x I2C HL
QVQLVQSGAEVKKPGESVKVSCKASGYTFTNYGMNWVKQAPGQGLKWMGWINTYTGEPTYADDFKGRVTMTTDTSTSTAYMEIRNLRNDDTAVYYCARWSWSDGYYVYFDYWGQGTTVTVSSGGGGSGGGGSGGGGSDIVMTQSPDSLTVSLGERTTINCKSSQSVLDSSKNKNSLAWYQQKPGQPPKLLLSWASTRESGIPDRFSGSGSGTDFTLTIDSLQPEDSATYYCQQSAHFPITFGQGTRLEIKSGGGGSEVQLVESGGGLVQPGGSLKLSCAASGFTFNKYAMNWVRQAPGKGLEWVARIRSKYNNYATYYADSVKDRFTISRDDSKNTAYLQMNNLKTEDTAVYYCVRHGNFGNSYISYWAYWGQGTLVTVSSGGGGSGGGGSGGGGSQTVVTQEPSLTVSPGGTVTLTCGSSTGAVTSGNYPNWVQQKPGQAPRGLIGGTKFLAPGTPARFSGSLLGGKAALTLSGVQPEDEAEYYCVLWYSNRWVFGGGTKLTVL

SEQ ID NO: 274 - DNA, 1515 bp, Artificial Sequence
  CD33 AC8 HL x I2C HL
caggtgcagctggtgcagtctggagctgaggtgaagaagcctggagagtcagtcaaggtctcctgcaaggctagcgggtataccttcacaaactatggaatgaactgggtgaagcaggctccaggacagggtttaaagtggatgggctggataaacacctacactggagagccaacatatgctgatgacttcaagggacgggttaccatgactacggatacctctaccagcactgcctatatggaaatccgcaacctcagaaatgatgacacggctgtatattactgtgcgcgctggagttggagtgatggttactacgtttactttgactactggggccaaggcactacggtcaccgtctcctcaggtggtggtggttctggcggcggcggctccggtggtggtggttctgacatcgtgatgacacagtctccagactccctgactgtgtctctgggcgagaggaccaccatcaactgcaagtccagccagagtgttttagacagctccaagaataagaactccttagcttggtaccagcagaaaccaggacagcctcctaaattactcctttcctgggcatctacgcgggaatccgggatccctgaccgattcagtggcagcgggtctgggacagatttcactctcactattgacagcctgcagcctgaagattctgcaacttactattgtcaacagtctgcccacttcccgatcacctttggccaagggacacgactggagattaaatccggaggtggtggctccgaggtgcagctggtcgagtctggaggaggattggtgcagcctggagggtcattgaaactctcatgtgcagcctctggattcaccttcaataagtacgccatgaactgggtccgccaggctccaggaaagggtttggaatgggttgctcgcataagaagtaaatataataattatgcaacatattatgccgattcagtgaaagacaggttcaccatctccagagatgattcaaaaaacactgcctatctacaaatgaacaacttgaaaactgaggacactgccgtgtactactgtgtgagacatgggaacttcggtaatagctacatatcctactgggcttactggggccaagggactctggtcaccgtctcctcaggtggtggtggttctggcggcggcggctccggtggtggtggttctcagactgttgtgactcaggaaccttcactcaccgtatcacctggtggaacagtcacactcacttgtggctcctcgactggggctgttacatctggcaactacccaaactgggtccaacaaaaaccaggtcaggcaccccgtggtctaataggtgggactaagttcctcgcccccggtactcctgccagattctcaggctccctgcttggaggcaaggctgccctcaccctctcaggggtacagccagaggatgaggcagaatattactgtgttctatggtacagcaaccgctgggtgttcggtggaggaaccaaactgactgtccta

SEQ ID NO: 275 - protein, 505 aa, Artificial Sequence
  CD33 AH11 HL x H2C HL
QVQLVQSGAEVKKPGESVKVSCKASGYTFTNYGMNWVKQAPGQGLKWMGWINTYTGEPTYADDFKGRVTMTSDTSTSTAYMEISSLRSDDTAVYYCARWSWSDGYYVYFDYWGQGTTVTVSSGGGGSGGGGSGGGGSDIVMTQSPDSLTVSLGERTTINCKSSQSVLDSSKNKNSLAWYQQKPGQPPKLLLSWASTRESGIPDRFSGSGSGTDFTLTIDSLQPEDSATYYCQQSAHFPITFGQGTRLEIKSGGGGSEVQLVESGGGLVQPGGSLKLSCAASGFTFNKYAMNWVRQAPGKGLEWVARIRSKYNNYATYYADSVKDRFTISRDDSKNTAYLQMNNLKTEDTAVYYCVRHGNFGNSYISYWAYWGQGTLVTVSSGGGGSGGGGSGGGGSQTVVTQEPSLTVSPGGTVTLTCGSSTGAVTSGYYPNWVQQKPGQAPRGLIGGTKFLAPGTPARFSGSLLGGKAALTLSGVQPEDEAEYYCALWYSNRWVFGGGTKLTVL

SEQ ID NO: 276 - DNA, 1515 bp, Artificial Sequence
  CD33 AH11 HL x H2C HL
caggtgcagctggtgcagtctggagctgaggtgaagaagcctggagagtcagtcaaggtctcctgcaaggctagcgggtataccttcacaaactatggaatgaactgggtgaagcaggctccaggacagggtttaaagtggatgggctggataaacacctacactggagagccaacatatgctgatgacttcaagggacgggttaccatgacttcggatacctctaccagcactgcctatatggaaatcagcagcctcagaagtgatgacacggctgtatattactgtgcgcgctggagttggagtgatggttactacgtttactttgactactggggccaaggcactacggtcaccgtctcctcaggtggtggtggttctggcggcggcggctccggtggtggtggttctgacatcgtgatgacacagtctccagactccctgactgtgtctctgggcgagaggaccaccatcaactgcaagtccagccagagtgttttagacagctccaagaataagaactccttagcttggtaccagcagaaaccaggacagcctcctaaattactcctttcctgggcatctacgcgggaatccgggatccctgaccgattcagtggcagcgggtctgggacagatttcactctcactattgacagcctgcagcctgaagattctgcaacttactattgtcaacagtctgcccacttcccgatcacctttggccaagggacacgactggagattaaatccggaggtggtggctccgaggtgcagctggtcgagtctggaggaggattggtgcagcctggagggtcattgaaactctcatgtgcagcctctggattcaccttcaataagtacgccatgaactgggtccgccaggctccaggaaagggtttggaatgggttgctcgcataagaagtaaatataataattatgcaacatattatgccgattcagtgaaagacaggttcaccatctccagagatgattcaaaaaacactgcctatctacaaatgaacaacttgaaaactgaggacactgccgtgtactactgtgtgagacatgggaacttcggtaatagctacatatcctactgggcttactggggccaagggactctggtcaccgtctcctcaggtggtggtggttctggcggcggcggctccggtggtggtggttctcagactgttgtgactcaggaaccttcactcaccgtatcacctggtggaacagtcacactcacttgtggctcctcgactggggctgttacatctggctactacccaaactgggtccaacaaaaaccaggtcaggcaccccgtggtctaataggtgggactaagttcctcgcccccggtactcctgccagattctcaggctccctgcttggaggcaaggctgccctcaccctctcaggggtacagccagaggatgaggcagaatattactgtgctctatggtacagcaaccgctgggtgttcggtggaggaaccaaactgactgtccta

SEQ ID NO: 277 - protein, 505 aa, Artificial Sequence
  CD33 AH11 HL x F12Q HL
QVQLVQSGAEVKKPGESVKVSCKASGYTFTNYGMNWVKQAPGQGLKWMGWINTYTGEPTYADDFKGRVTMTSDTSTSTAYMEISSLRSDDTAVYYCARWSWSDGYYVYFDYWGQGTTVTVSSGGGGSGGGGSGGGGSDIVMTQSPDSLTVSLGERTTINCKSSQSVLDSSKNKNSLAWYQQKPGQPPKLLLSWASTRESGIPDRFSGSGSGTDFTLTIDSLQPEDSATYYCQQSAHFPITFGQGTRLEIKSGGGGSEVQLVESGGGLVQPGGSLKLSCAASGFTFNSYAMNWVRQAPGKGLEWVARIRSKYNNYATYYADSVKGRFTISRDDSKNTAYLQMNNLKTEDTAVYYCVRHGNFGNSYVSWWAYWGQGTLVTVSSGGGGSGGGGSGGGGSQTVVTQEPSLTVSPGGTVTLTCGSSTGAVTSGNYPNWVQQKPGQAPRGLIGGTKFLAPGTPARFSGSLLGGKAALTLSGVQPEDEAEYYCVLWYSNRWVFGGGTKLTVL

SEQ ID NO: 278 - DNA, 1515 bp, Artificial Sequence
  CD33 AH11 HL x F12Q HL
caggtgcagctggtgcagtctggagctgaggtgaagaagcctggagagtcagtcaaggtctcctgcaaggctagcgggtataccttcacaaactatggaatgaactgggtgaagcaggctccaggacagggtttaaagtggatgggctggataaacacctacactggagagccaacatatgctgatgacttcaagggacgggttaccatgacttcggatacctctaccagcactgcctatatggaaatcagcagcctcagaagtgatgacacggctgtatattactgtgcgcgctggagttggagtgatggttactacgtttactttgactactggggccaaggcactacggtcaccgtctcctcaggtggtggtggttctggcggcggcggctccggtggtggtggttctgacatcgtgatgacacagtctccagactccctgactgtgtctctgggcgagaggaccaccatcaactgcaagtccagccagagtgttttagacagctccaagaataagaactccttagcttggtaccagcagaaaccaggacagcctcctaaattactcctttcctgggcatctacgcgggaatccgggatccctgaccgattcagtggcagcgggtctgggacagatttcactctcactattgacagcctgcagcctgaagattctgcaacttactattgtcaacagtctgcccacttcccgatcacctttggccaagggacacgactggagattaaatccggaggtggtggctccgaggtgcagctggtcgagtctggaggaggattggtgcagcctggagggtcattgaaactctcatgtgcagcctctggattcaccttcaatagctacgccatgaactgggtccgccaggctccaggaaagggtttggaatgggttgctcgcataagaagtaaatataataattatgcaacatattatgccgattcagtgaaaggcaggttcaccatctccagagatgattcaaaaaacactgcctatctacaaatgaacaacttgaaaactgaggacactgccgtgtactactgtgtgagacatgggaacttcggtaatagctacgtttcctggtgggcttactggggccaagggactctggtcaccgtctcctcaggtggtggtggttctggcggcggcggctccggtggtggtggttctcagactgttgtgactcaggaaccttcactcaccgtatcacctggtggaacagtcacactcacttgtggctcctcgactggggctgttacatctggcaactacccaaactgggtccaacaaaaaccaggtcaggcaccccgtggtctaataggtgggactaagttcctcgcccccggtactcctgccagattctcaggctccctgcttggaggcaaggctgccctcaccctctcaggggtacagccagaggatgaggcagaatattactgtgttctatggtacagcaaccgctgggtgttcggtggaggaaccaaactgactgtccta

SEQ ID NO: 279 - protein, 505 aa, Artificial Sequence
  CD33 AH11 HL x I2C HL
QVQLVQSGAEVKKPGESVKVSCKASGYTFTNYGMNWVKQAPGQGLKWMGWINTYTGEPTYADDFKGRVTMTSDTSTSTAYMEISSLRSDDTAVYYCARWSWSDGYYVYFDYWGQGTTVTVSSGGGGSGGGGSGGGGSDIVMTQSPDSLTVSLGERTTINCKSSQSVLDSSKNKNSLAWYQQKPGQPPKLLLSWASTRESGIPDRFSGSGSGTDFTLTIDSLQPEDSATYYCQQSAHFPITFGQGTRLEIKSGGGGSEVQLVESGGGLVQPGGSLKLSCAASGFTFNKYAMNWVRQAPGKGLEWVARIRSKYNNYATYYADSVKDRFTISRDDSKNTAYLQMNNLKTEDTAVYYCVRHGNFGNSYISYWAYWGQGTLVTVSSGGGGSGGGGSGGGGSQTVVTQEPSLTVSPGGTVTLTCGSSTGAVTSGNYPNWVQQKPGQAPRGLIGGTKFLAPGTPARFSGSLLGGKAALTLSGVQPEDEAEYYCVLWYSNRWVFGGGTKLTVL

SEQ ID NO: 280 - DNA, 1515 bp, Artificial Sequence
  CD33 AH11 HL x I2C HL
caggtgcagctggtgcagtctggagctgaggtgaagaagcctggagagtcagtcaaggtctcctgcaaggctagcgggtataccttcacaaactatggaatgaactgggtgaagcaggctccaggacagggtttaaagtggatgggctggataaacacctacactggagagccaacatatgctgatgacttcaagggacgggttaccatgacttcggatacctctaccagcactgcctatatggaaatcagcagcctcagaagtgatgacacggctgtatattactgtgcgcgctggagttggagtgatggttactacgtttactttgactactggggccaaggcactacggtcaccgtctcctcaggtggtggtggttctggcggcggcggctccggtggtggtggttctgacatcgtgatgacacagtctccagactccctgactgtgtctctgggcgagaggaccaccatcaactgcaagtccagccagagtgttttagacagctccaagaataagaactccttagcttggtaccagcagaaaccaggacagcctcctaaattactcctttcctgggcatctacgcgggaatccgggatccctgaccgattcagtggcagcgggtctgggacagatttcactctcactattgacagcctgcagcctgaagattctgcaacttactattgtcaacagtctgcccacttcccgatcacctttggccaagggacacgactggagattaaatccggaggtggtggctccgaggtgcagctggtcgagtctggaggaggattggtgcagcctggagggtcattgaaactctcatgtgcagcctctggattcaccttcaataagtacgccatgaactgggtccgccaggctccaggaaagggtttggaatgggttgctcgcataagaagtaaatataataattatgcaacatattatgccgattcagtgaaagacaggttcaccatctccagagatgattcaaaaaacactgcctatctacaaatgaacaacttgaaaactgaggacactgccgtgtactactgtgtgagacatgggaacttcggtaatagctacatatcctactgggcttactggggccaagggactctggtcaccgtctcctcaggtggtggtggttctggcggcggcggctccggtggtggtggttctcagactgttgtgactcaggaaccttcactcaccgtatcacctggtggaacagtcacactcacttgtggctcctcgactggggctgttacatctggcaactacccaaactgggtccaacaaaaaccaggtcaggcaccccgtggtctaataggtgggactaagttcctcgcccccggtactcctgccagattctcaggctccctgcttggaggcaaggctgccctcaccctctcaggggtacagccagaggatgaggcagaatattactgtgttctatggtacagcaaccgctgggtgttcggtggaggaaccaaactgactgtccta

SEQ ID NO: 281 - protein, 505 aa, Artificial Sequence
  CD33 B3 HL x H2C HL
QVQLVQSGAEVKKPGESVKVSCKASGYTFTNYGMNWVKQAPGQGLEWMGWINTYTGETNYADKFQGRVTFTSDTSTSTAYMELRNLKSDDTAVYYCARWSWSDGYYVYFDYWGQGTTVTVSSGGGGSGGGGSGGGGSDIVMTQSPDSMTVSLGERTTINCKSSQSVLDSSTNKNSLAWYQQKPGQPPKLLLSWASTRESGIPDRFSGSGSGTDFTLTIDSLQPEDSATYYCQQSAHFPITFGQGTRLDIKSGGGGSEVQLVESGGGLVQPGGSLKLSCAASGFTFNKYAMNWVRQAPGKGLEWVARIRSKYNNYATYYADSVKDRFTISRDDSKNTAYLQMNNLKTEDTAVYYCVRHGNFGNSYISYWAYWGQGTLVTVSSGGGGSGGGGSGGGGSQTVVTQEPSLTVSPGGTVTLTCGSSTGAVTSGYYPNWVQQKPGQAPRGLIGGTKFLAPGTPARFSGSLLGGKAALTLSGVQPEDEAEYYCALWYSNRWVFGGGTKLTVL

SEQ ID NO: 282 - DNA, 1515 bp, Artificial Sequence
  CD33 B3 HL x H2C HL
caggtgcagctggtgcagtctggagctgaggtgaagaagcctggagagtcagtcaaggtctcctgcaaggctagcgggtataccttcacaaactatggaatgaactgggtgaagcaggctccaggacagggtttagagtggatgggctggataaacacctacactggagagacaaactatgctgataagttccagggacgcgttaccttcacttcggatacctctaccagcactgcctatatggaactccgcaacctcaaaagtgatgacacggctgtatattactgtgcgcgctggagttggagtgatggttactacgtttactttgactactggggccaaggcactacggtcaccgtctcctcaggtggtggtggttctggcggcggcggctccggtggtggtggttctgacatcgtgatgacacagtctccagactccatgactgtgtctctgggcgagaggaccaccatcaactgcaagtccagccagagtgttttagacagctccacgaataagaactccttagcttggtaccagcagaaaccaggacagcctcctaaattactcctttcctgggcatctacgcgggaatccgggatccctgaccgattcagtggcagcgggtctgggacagatttcactctcactattgacagcctgcagcctgaagattctgcaacttactattgtcaacagtctgcccacttcccgatcacctttggccaagggacacgactggacattaaatccggaggtggtggctccgaggtgcagctggtcgagtctggaggaggattggtgcagcctggagggtcattgaaactctcatgtgcagcctctggattcaccttcaataagtacgccatgaactgggtccgccaggctccaggaaagggtttggaatgggttgctcgcataagaagtaaatataataattatgcaacatattatgccgattcagtgaaagacaggttcaccatctccagagatgattcaaaaaacactgcctatctacaaatgaacaacttgaaaactgaggacactgccgtgtactactgtgtgagacatgggaacttcggtaatagctacatatcctactgggcttactggggccaagggactctggtcaccgtctcctcaggtggtggtggttctggcggcggcggctccggtggtggtggttctcagactgttgtgactcaggaaccttcactcaccgtatcacctggtggaacagtcacactcacttgtggctcctcgactggggctgttacatctggctactacccaaactgggtccaacaaaaaccaggtcaggcaccccgtggtctaataggtgggactaagttcctcgcccccggtactcctgccagattctcaggctccctgcttggaggcaaggctgccctcaccctctcaggggtacagccagaggatgaggcagaatattactgtgctctatggtacagcaaccgctgggtgttcggtggaggaaccaaactgactgtccta

SEQ ID NO: 283 - protein, 505 aa, Artificial Sequence
  CD33 B3 HL x F12Q HL
QVQLVQSGAEVKKPGESVKVSCKASGYTFTNYGMNWVKQAPGQGLEWMGWINTYTGETNYADKFQGRVTFTSDTSTSTAYMELRNLKSDDTAVYYCARWSWSDGYYVYFDYWGQGTTVTVSSGGGGSGGGGSGGGGSDIVMTQSPDSMTVSLGERTTINCKSSQSVLDSSTNKNSLAWYQQKPGQPPKLLLSWASTRESGIPDRFSGSGSGTDFTLTIDSLQPEDSATYYCQQSAHFPITFGQGTRLDIKSGGGGSEVQLVESGGGLVQPGGSLKLSCAASGFTFNSYAMNWVRQAPGKGLEWVARIRSKYNNYATYYADSVKGRFTISRDDSKNTAYLQMNNLKTEDTAVYYCVRHGNFGNSYVSWWAYWGQGTLVTVSSGGGGSGGGGSGGGGSQTVVTQEPSLTVSPGGTVTLTCGSSTGAVTSGNYPNWVQQKPGQAPRGLIGGTKFLAPGTPARFSGSLLGGKAALTLSGVQPEDEAEYYCVLWYSNRWVFGGGTKLTVL

SEQ ID NO: 284 - DNA, 1515 bp, Artificial Sequence
  CD33 B3 HL x F12Q HL
caggtgcagctggtgcagtctggagctgaggtgaagaagcctggagagtcagtcaaggtctcctgcaaggctagcgggtataccttcacaaactatggaatgaactgggtgaagcaggctccaggacagggtttagagtggatgggctggataaacacctacactggagagacaaactatgctgataagttccagggacgcgttaccttcacttcggatacctctaccagcactgcctatatggaactccgcaacctcaaaagtgatgacacggctgtatattactgtgcgcgctggagttggagtgatggttactacgtttactttgactactggggccaaggcactacggtcaccgtctcctcaggtggtggtggttctggcggcggcggctccggtggtggtggttctgacatcgtgatgacacagtctccagactccatgactgtgtctctgggcgagaggaccaccatcaactgcaagtccagccagagtgttttagacagctccacgaataagaactccttagcttggtaccagcagaaaccaggacagcctcctaaattactcctttcctgggcatctacgcgggaatccgggatccctgaccgattcagtggcagcgggtctgggacagatttcactctcactattgacagcctgcagcctgaagattctgcaacttactattgtcaacagtctgcccacttcccgatcacctttggccaagggacacgactggacattaaatccggaggtggtggctccgaggtgcagctggtcgagtctggaggaggattggtgcagcctggagggtcattgaaactctcatgtgcagcctctggattcaccttcaatagctacgccatgaactgggtccgccaggctccaggaaagggtttggaatgggttgctcgcataagaagtaaatataataattatgcaacatattatgccgattcagtgaaaggcaggttcaccatctccagagatgattcaaaaaacactgcctatctacaaatgaacaacttgaaaactgaggacactgccgtgtactactgtgtgagacatgggaacttcggtaatagctacgtttcctggtgggcttactggggccaagggactctggtcaccgtctcctcaggtggtggtggttctggcggcggcggctccggtggtggtggttctcagactgttgtgactcaggaaccttcactcaccgtatcacctggtggaacagtcacactcacttgtggctcctcgactggggctgttacatctggcaactacccaaactgggtccaacaaaaaccaggtcaggcaccccgtggtctaataggtgggactaagttcctcgcccccggtactcctgccagattctcaggctccctgcttggaggcaaggctgccctcaccctctcaggggtacagccagaggatgaggcagaatattactgtgttctatggtacagcaaccgctgggtgttcggtggaggaaccaaactgactgtccta

SEQ ID NO: 285 - protein, 505 aa, Artificial Sequence
  CD33 B3 HL x I2C HL
QVQLVQSGAEVKKPGESVKVSCKASGYTFTNYGMNWVKQAPGQGLEWMGWINTYTGETNYADKFQGRVTFTSDTSTSTAYMELRNLKSDDTAVYYCARWSWSDGYYVYFDYWGQGTTVTVSSGGGGSGGGGSGGGGSDIVMTQSPDSMTVSLGERTTINCKSSQSVLDSSTNKNSLAWYQQKPGQPPKLLLSWASTRESGIPDRFSGSGSGTDFTLTIDSLQPEDSATYYCQQSAHFPITFGQGTRLDIKSGGGGSEVQLVESGGGLVQPGGSLKLSCAASGFTFNKYAMNWVRQAPGKGLEWVARIRSKYNNYATYYADSVKDRFTISRDDSKNTAYLQMNNLKTEDTAVYYCVRHGNFGNSYISYWAYWGQGTLVTVSSGGGGSGGGGSGGGGSQTVVTQEPSLTVSPGGTVTLTCGSSTGAVTSGNYPNWVQQKPGQAPRGLIGGTKFLAPGTPARFSGSLLGGKAALTLSGVQPEDEAEYYCVLWYSNRWVFGGGTKLTVL

SEQ ID NO: 286 - DNA, 1515 bp, Artificial Sequence
  CD33 B3 HL x I2C HL
caggtgcagctggtgcagtctggagctgaggtgaagaagcctggagagtcagtcaaggtctcctgcaaggctagcgggtataccttcacaaactatggaatgaactgggtgaagcaggctccaggacagggtttagagtggatgggctggataaacacctacactggagagacaaactatgctgataagttccagggacgcgttaccttcacttcggatacctctaccagcactgcctatatggaactccgcaacctcaaaagtgatgacacggctgtatattactgtgcgcgctggagttggagtgatggttactacgtttactttgactactggggccaaggcactacggtcaccgtctcctcaggtggtggtggttctggcggcggcggctccggtggtggtggttctgacatcgtgatgacacagtctccagactccatgactgtgtctctgggcgagaggaccaccatcaactgcaagtccagccagagtgttttagacagctccacgaataagaactccttagcttggtaccagcagaaaccaggacagcctcctaaattactcctttcctgggcatctacgcgggaatccgggatccctgaccgattcagtggcagcgggtctgggacagatttcactctcactattgacagcctgcagcctgaagattctgcaacttactattgtcaacagtctgcccacttcccgatcacctttggccaagggacacgactggacattaaatccggaggtggtggctccgaggtgcagctggtcgagtctggaggaggattggtgcagcctggagggtcattgaaactctcatgtgcagcctctggattcaccttcaataagtacgccatgaactgggtccgccaggctccaggaaagggtttggaatgggttgctcgcataagaagtaaatataataattatgcaacatattatgccgattcagtgaaagacaggttcaccatctccagagatgattcaaaaaacactgcctatctacaaatgaacaacttgaaaactgaggacactgccgtgtactactgtgtgagacatgggaacttcggtaatagctacatatcctactgggcttactggggccaagggactctggtcaccgtctcctcaggtggtggtggttctggcggcggcggctccggtggtggtggttctcagactgttgtgactcaggaaccttcactcaccgtatcacctggtggaacagtcacactcacttgtggctcctcgactggggctgttacatctggcaactacccaaactgggtccaacaaaaaccaggtcaggcaccccgtggtctaataggtgggactaagttcctcgcccccggtactcctgccagattctcaggctccctgcttggaggcaaggctgccctcaccctctcaggggtacagccagaggatgaggcagaatattactgtgttctatggtacagcaaccgctgggtgttcggtggaggaaccaaactgactgtccta

SEQ ID NO: 287 - protein, 505 aa, Artificial Sequence
  CD33 F2 HL x H2C HL
QVQLVQSGAEVKKPGESVKVSCKASGYTFTNYGMNWVKQAPGQGLEWMGWINTYTGETNYADKFQGRVTFTSDTSTSTAYMELRNLKSDDTAVYYCARWSWSDGYYVYFDYWGQGTTVTVSSGGGGSGGGGSGGGGSDIVMTQSPDSLSVSLGERTTINCKSSQSVLDSSTNKNSLAWYQQKPGQPPKLLLSWASTRESGIPDRFSGSGSGTDFTLTIDSLQPEDSATYYCQQSAHFPITFGQGTRLEIKSGGGGSEVQLVESGGGLVQPGGSLKLSCAASGFTFNKYAMNWVRQAPGKGLEWVARIRSKYNNYATYYADSVKDRFTISRDDSKNTAYLQMNNLKTEDTAVYYCVRHGNFGNSYISYWAYWGQGTLVTVSSGGGGSGGGGSGGGGSQTVVTQEPSLTVSPGGTVTLTCGSSTGAVTSGYYPNWVQQKPGQAPRGLIGGTKFLAPGTPARFSGSLLGGKAALTLSGVQPEDEAEYYCALWYSNRWVFGGGTKLTVL

SEQ ID NO: 288 - DNA, 1515 bp, Artificial Sequence
  CD33 F2 HL x H2C HL
caggtgcagctggtgcagtctggagctgaggtgaagaagcctggagagtcagtcaaggtctcctgcaaggctagcgggtataccttcacaaactatggaatgaactgggtgaagcaggctccaggacagggtttagagtggatgggctggataaacacctacactggagagacaaactatgctgataagttccagggacgcgttaccttcacttcggatacctctaccagcactgcctatatggaactccgcaacctcaaaagtgatgacacggctgtatattactgtgcgcgctggagttggagtgatggttactacgtttactttgactactggggccaaggcactacggtcaccgtctcctcaggtggtggtggttctggcggcggcggctccggtggtggtggttctgacatcgtgatgacacagtctccagactccctgtctgtgtctctgggcgagaggaccaccatcaactgcaagtccagccagagtgttttagacagctccacgaataagaactccttagcttggtaccagcagaaaccaggacagcctcctaaattactcctttcctgggcatctacgcgggaatccgggatccctgaccgattcagtggcagcgggtctgggacagatttcactctcactattgacagcctgcagcctgaagattctgcaacttactattgtcaacagtctgcccacttcccgatcacctttggccaagggacacgactggagattaaatccggaggtggtggctccgaggtgcagctggtcgagtctggaggaggattggtgcagcctggagggtcattgaaactctcatgtgcagcctctggattcaccttcaataagtacgccatgaactgggtccgccaggctccaggaaagggtttggaatgggttgctcgcataagaagtaaatataataattatgcaacatattatgccgattcagtgaaagacaggttcaccatctccagagatgattcaaaaaacactgcctatctacaaatgaacaacttgaaaactgaggacactgccgtgtactactgtgtgagacatgggaacttcggtaatagctacatatcctactgggcttactggggccaagggactctggtcaccgtctcctcaggtggtggtggttctggcggcggcggctccggtggtggtggttctcagactgttgtgactcaggaaccttcactcaccgtatcacctggtggaacagtcacactcacttgtggctcctcgactggggctgttacatctggctactacccaaactgggtccaacaaaaaccaggtcaggcaccccgtggtctaataggtgggactaagttcctcgcccccggtactcctgccagattctcaggctccctgcttggaggcaaggctgccctcaccctctcaggggtacagccagaggatgaggcagaatattactgtgctctatggtacagcaaccgctgggtgttcggtggaggaaccaaactgactgtccta

SEQ ID NO: 289 - protein, 505 aa, Artificial Sequence
  CD33 F2 HL x F12Q HL
QVQLVQSGAEVKKPGESVKVSCKASGYTFTNYGMNWVKQAPGQGLEWMGWINTYTGETNYADKFQGRVTFTSDTSTSTAYMELRNLKSDDTAVYYCARWSWSDGYYVYFDYWGQGTTVTVSSGGGGSGGGGSGGGGSDIVMTQSPDSLSVSLGERTTINCKSSQSVLDSSTNKNSLAWYQQKPGQPPKLLLSWASTRESGIPDRFSGSGSGTDFTLTIDSLQPEDSATYYCQQSAHFPITFGQGTRLEIKSGGGGSEVQLVESGGGLVQPGGSLKLSCAASGFTFNSYAMNWVRQAPGKGLEWVARIRSKYNNYATYYADSVKGRFTISRDDSKNTAYLQMNNLKTEDTAVYYCVRHGNFGNSYVSWWAYWGQGTLVTVSSGGGGSGGGGSGGGGSQTVVTQEPSLTVSPGGTVTLTCGSSTGAVTSGNYPNWVQQKPGQAPRGLIGGTKFLAPGTPARFSGSLLGGKAALTLSGVQPEDEAEYYCVLWYSNRWVFGGGTKLTVL

SEQ ID NO: 290 - DNA, 1515 bp, Artificial Sequence
  CD33 F2 HL x F12Q HL
caggtgcagctggtgcagtctggagctgaggtgaagaagcctggagagtcagtcaaggtctcctgcaaggctagcgggtataccttcacaaactatggaatgaactgggtgaagcaggctccaggacagggtttagagtggatgggctggataaacacctacactggagagacaaactatgctgataagttccagggacgcgttaccttcacttcggatacctctaccagcactgcctatatggaactccgcaacctcaaaagtgatgacacggctgtatattactgtgcgcgctggagttggagtgatggttactacgtttactttgactactggggccaaggcactacggtcaccgtctcctcaggtggtggtggttctggcggcggcggctccggtggtggtggttctgacatcgtgatgacacagtctccagactccctgtctgtgtctctgggcgagaggaccaccatcaactgcaagtccagccagagtgttttagacagctccacgaataagaactccttagcttggtaccagcagaaaccaggacagcctcctaaattactcctttcctgggcatctacgcgggaatccgggatccctgaccgattcagtggcagcgggtctgggacagatttcactctcactattgacagcctgcagcctgaagattctgcaacttactattgtcaacagtctgcccacttcccgatcacctttggccaagggacacgactggagattaaatccggaggtggtggctccgaggtgcagctggtcgagtctggaggaggattggtgcagcctggagggtcattgaaactctcatgtgcagcctctggattcaccttcaatagctacgccatgaactgggtccgccaggctccaggaaagggtttggaatgggttgctcgcataagaagtaaatataataattatgcaacatattatgccgattcagtgaaaggcaggttcaccatctccagagatgattcaaaaaacactgcctatctacaaatgaacaacttgaaaactgaggacactgccgtgtactactgtgtgagacatgggaacttcggtaatagctacgtttcctggtgggcttactggggccaagggactctggtcaccgtctcctcaggtggtggtggttctggcggcggcggctccggtggtggtggttctcagactgttgtgactcaggaaccttcactcaccgtatcacctggtggaacagtcacactcacttgtggctcctcgactggggctgttacatctggcaactacccaaactgggtccaacaaaaaccaggtcaggcaccccgtggtctaataggtgggactaagttcctcgcccccggtactcctgccagattctcaggctccctgcttggaggcaaggctgccctcaccctctcaggggtacagccagaggatgaggcagaatattactgtgttctatggtacagcaaccgctgggtgttcggtggaggaaccaaactgactgtccta

SEQ ID NO: 291 - protein, 505 aa, Artificial Sequence
  CD33 F2 HL x I2C HL
QVQLVQSGAEVKKPGESVKVSCKASGYTFTNYGMNWVKQAPGQGLEWMGWINTYTGETNYADKFQGRVTFTSDTSTSTAYMELRNLKSDDTAVYYCARWSWSDGYYVYFDYWGQGTTVTVSSGGGGSGGGGSGGGGSDIVMTQSPDSLSVSLGERTTINCKSSQSVLDSSTNKNSLAWYQQKPGQPPKLLLSWASTRESGIPDRFSGSGSGTDFTLTIDSLQPEDSATYYCQQSAHFPITFGQGTRLEIKSGGGGSEVQLVESGGGLVQPGGSLKLSCAASGFTFNKYAMNWVRQAPGKGLEWVARIRSKYNNYATYYADSVKDRFTISRDDSKNTAYLQMNNLKTEDTAVYYCVRHGNFGNSYISYWAYWGQGTLVTVSSGGGGSGGGGSGGGGSQTVVTQEPSLTVSPGGTVTLTCGSSTGAVTSGNYPNWVQQKPGQAPRGLIGGTKFLAPGTPARFSGSLLGGKAALTLSGVQPEDEAEYYCVLWYSNRWVFGGGTKLTVL

SEQ ID NO: 292 - DNA, 1515 bp, Artificial Sequence
  CD33 F2 HL x I2C HL
caggtgcagctggtgcagtctggagctgaggtgaagaagcctggagagtcagtcaaggtctcctgcaaggctagcgggtataccttcacaaactatggaatgaactgggtgaagcaggctccaggacagggtttagagtggatgggctggataaacacctacactggagagacaaactatgctgataagttccagggacgcgttaccttcacttcggatacctctaccagcactgcctatatggaactccgcaacctcaaaagtgatgacacggctgtatattactgtgcgcgctggagttggagtgatggttactacgtttactttgactactggggccaaggcactacggtcaccgtctcctcaggtggtggtggttctggcggcggcggctccggtggtggtggttctgacatcgtgatgacacagtctccagactccctgtctgtgtctctgggcgagaggaccaccatcaactgcaagtccagccagagtgttttagacagctccacgaataagaactccttagcttggtaccagcagaaaccaggacagcctcctaaattactcctttcctgggcatctacgcgggaatccgggatccctgaccgattcagtggcagcgggtctgggacagatttcactctcactattgacagcctgcagcctgaagattctgcaacttactattgtcaacagtctgcccacttcccgatcacctttggccaagggacacgactggagattaaatccggaggtggtggctccgaggtgcagctggtcgagtctggaggaggattggtgcagcctggagggtcattgaaactctcatgtgcagcctctggattcaccttcaataagtacgccatgaactgggtccgccaggctccaggaaagggtttggaatgggttgctcgcataagaagtaaatataataattatgcaacatattatgccgattcagtgaaagacaggttcaccatctccagagatgattcaaaaaacactgcctatctacaaatgaacaacttgaaaactgaggacactgccgtgtactactgtgtgagacatgggaacttcggtaatagctacatatcctactgggcttactggggccaagggactctggtcaccgtctcctcaggtggtggtggttctggcggcggcggctccggtggtggtggttctcagactgttgtgactcaggaaccttcactcaccgtatcacctggtggaacagtcacactcacttgtggctcctcgactggggctgttacatctggcaactacccaaactgggtccaacaaaaaccaggtcaggcaccccgtggtctaataggtgggactaagttcctcgcccccggtactcctgccagattctcaggctccctgcttggaggcaaggctgccctcaccctctcaggggtacagccagaggatgaggcagaatattactgtgttctatggtacagcaaccgctgggtgttcggtggaggaaccaaactgactgtccta

SEQ ID NO: 293 - protein, 505 aa, Artificial Sequence
  CD33 B10 HL x H2C HL
QVQLVQSGAEVKKPGESVKVSCKASGYTFTNYGMNWVKQAPGQGLEWMGWINTYTGEPTYADKFQGRVTMTTDTSTSTAYMEIRNLRSDDTAVYYCARWSWSDGYYVYFDYWGQGTTVTVSSGGGGSGGGGSGGGGSDIVMTQSPDSLTVSLGERTTINCKSSQSVLDSSNNKNSLAWYQQKPGQPPKLLLSWASTRESGIPDRFSGSGSGTDFTLTIDGLQPEDSATYYCQQSAHFPITFGQGTRLEIKSGGGGSEVQLVESGGGLVQPGGSLKLSCAASGFTFNKYAMNWVRQAPGKGLEWVARIRSKYNNYATYYADSVKDRFTISRDDSKNTAYLQMNNLKTEDTAVYYCVRHGNFGNSYISYWAYWGQGTLVTVSSGGGGSGGGGSGGGGSQTVVTQEPSLTVSPGGTVTLTCGSSTGAVTSGYYPNWVQQKPGQAPRGLIGGTKFLAPGTPARFSGSLLGGKAALTLSGVQPEDEAEYYCALWYSNRWVFGGGTKLTVL

SEQ ID NO: 294 - DNA, 1515 bp, Artificial Sequence
  CD33 B10 HL x H2C HL
caggtgcagctggtgcagtctggagctgaggtgaagaagcctggtgagtcagtcaaggtctcctgcaaggctagcgggtataccttcacaaactatggaatgaactgggtgaagcaggctccaggacagggtttagagtggatgggctggataaacacctacactggagagccaacctatgctgataagttccagggacgcgttaccatgactacggatacctctaccagcactgcctatatggaaatccgcaacctcagaagtgatgacacggctgtatattactgtgcgcgctggagttggagtgatggttactacgtttactttgactactggggccaaggcactacggtcaccgtctcctcaggtggtggtggttctggcggcggcggctccggtggtggtggttctgacatcgtgatgacacagtctccagactccctgactgtgtctctgggcgagaggaccaccatcaactgcaagtccagccagagtgttttagacagctccaacaataagaactccttagcttggtaccagcagaaaccaggacagcctcctaaattactcctttcctgggcatctacgcgggaatccgggatccctgaccgattcagtggcagcggttctgggacagatttcactctcactattgacggcctgcagcctgaagattctgcaacttactattgtcaacagtctgcccacttcccgatcacctttggccaagggacacgactggagattaaatccggaggtggtggctccgaggtgcagctggtcgagtctggaggaggattggtgcagcctggagggtcattgaaactctcatgtgcagcctctggattcaccttcaataagtacgccatgaactgggtccgccaggctccaggaaagggtttggaatgggttgctcgcataagaagtaaatataataattatgcaacatattatgccgattcagtgaaagacaggttcaccatctccagagatgattcaaaaaacactgcctatctacaaatgaacaacttgaaaactgaggacactgccgtgtactactgtgtgagacatgggaacttcggtaatagctacatatcctactgggcttactggggccaagggactctggtcaccgtctcctcaggtggtggtggttctggcggcggcggctccggtggtggtggttctcagactgttgtgactcaggaaccttcactcaccgtatcacctggtggaacagtcacactcacttgtggctcctcgactggggctgttacatctggctactacccaaactgggtccaacaaaaaccaggtcaggcaccccgtggtctaataggtgggactaagttcctcgcccccggtactcctgccagattctcaggctccctgcttggaggcaaggctgccctcaccctctcaggggtacagccagaggatgaggcagaatattactgtgctctatggtacagcaaccgctgggtgttcggtggaggaaccaaactgactgtccta

SEQ ID NO: 295 - protein, 505 aa, Artificial Sequence
  CD33 B10 HL x F12Q HL
QVQLVQSGAEVKKPGESVKVSCKASGYTFTNYGMNWVKQAPGQGLEWMGWINTYTGEPTYADKFQGRVTMTTDTSTSTAYMEIRNLRSDDTAVYYCARWSWSDGYYVYFDYWGQGTTVTVSSGGGGSGGGGSGGGGSDIVMTQSPDSLTVSLGERTTINCKSSQSVLDSSNNKNSLAWYQQKPGQPPKLLLSWASTRESGIPDRFSGSGSGTDFTLTIDGLQPEDSATYYCQQSAHFPITFGQGTRLEIKSGGGGSEVQLVESGGGLVQPGGSLKLSCAASGFTFNSYAMNWVRQAPGKGLEWVARIRSKYNNYATYYADSVKGRFTISRDDSKNTAYLQMNNLKTEDTAVYYCVRHGNFGNSYVSWWAYWGQGTLVTVSSGGGGSGGGGSGGGGSQTVVTQEPSLTVSPGGTVTLTCGSSTGAVTSGNYPNWVQQKPGQAPRGLIGGTKFLAPGTPARFSGSLLGGKAALTLSGVQPEDEAEYYCVLWYSNRWVFGGGTKLTVL

SEQ ID NO: 296 - DNA, 1515 bp, Artificial Sequence
  CD33 B10 HL x F12Q HL
caggtgcagctggtgcagtctggagctgaggtgaagaagcctggtgagtcagtcaaggtctcctgcaaggctagcgggtataccttcacaaactatggaatgaactgggtgaagcaggctccaggacagggtttagagtggatgggctggataaacacctacactggagagccaacctatgctgataagttccagggacgcgttaccatgactacggatacctctaccagcactgcctatatggaaatccgcaacctcagaagtgatgacacggctgtatattactgtgcgcgctggagttggagtgatggttactacgtttactttgactactggggccaaggcactacggtcaccgtctcctcaggtggtggtggttctggcggcggcggctccggtggtggtggttctgacatcgtgatgacacagtctccagactccctgactgtgtctctgggcgagaggaccaccatcaactgcaagtccagccagagtgttttagacagctccaacaataagaactccttagcttggtaccagcagaaaccaggacagcctcctaaattactcctttcctgggcatctacgcgggaatccgggatccctgaccgattcagtggcagcggttctgggacagatttcactctcactattgacggcctgcagcctgaagattctgcaacttactattgtcaacagtctgcccacttcccgatcacctttggccaagggacacgactggagattaaatccggaggtggtggctccgaggtgcagctggtcgagtctggaggaggattggtgcagcctggagggtcattgaaactctcatgtgcagcctctggattcaccttcaatagctacgccatgaactgggtccgccaggctccaggaaagggtttggaatgggttgctcgcataagaagtaaatataataattatgcaacatattatgccgattcagtgaaaggcaggttcaccatctccagagatgattcaaaaaacactgcctatctacaaatgaacaacttgaaaactgaggacactgccgtgtactactgtgtgagacatgggaacttcggtaatagctacgtttcctggtgggcttactggggccaagggactctggtcaccgtctcctcaggtggtggtggttctggcggcggcggctccggtggtggtggttctcagactgttgtgactcaggaaccttcactcaccgtatcacctggtggaacagtcacactcacttgtggctcctcgactggggctgttacatctggcaactacccaaactgggtccaacaaaaaccaggtcaggcaccccgtggtctaataggtgggactaagttcctcgcccccggtactcctgccagattctcaggctccctgcttggaggcaaggctgccctcaccctctcaggggtacagccagaggatgaggcagaatattactgtgttctatggtacagcaaccgctgggtgttcggtggaggaaccaaactgactgtccta

SEQ ID NO: 297 - protein, 505 aa, Artificial Sequence
  CD33 B10 HL x I2C HL
QVQLVQSGAEVKKPGESVKVSCKASGYTFTNYGMNWVKQAPGQGLEWMGWINTYTGEPTYADKFQGRVTMTTDTSTSTAYMEIRNLRSDDTAVYYCARWSWSDGYYVYFDYWGQGTTVTVSSGGGGSGGGGSGGGGSDIVMTQSPDSLTVSLGERTTINCKSSQSVLDSSNNKNSLAWYQQKPGQPPKLLLSWASTRESGIPDRFSGSGSGTDFTLTIDGLQPEDSATYYCQQSAHFPITFGQGTRLEIKSGGGGSEVQLVESGGGLVQPGGSLKLSCAASGFTFNKYAMNWVRQAPGKGLEWVARIRSKYNNYATYYADSVKDRFTISRDDSKNTAYLQMNNLKTEDTAVYYCVRHGNFGNSYISYWAYWGQGTLVTVSSGGGGSGGGGSGGGGSQTVVTQEPSLTVSPGGTVTLTCGSSTGAVTSGNYPNWVQQKPGQAPRGLIGGTKFLAPGTPARFSGSLLGGKAALTLSGVQPEDEAEYYCVLWYSNRWVFGGGTKLTVL

SEQ ID NO: 298 - DNA, 1515 bp, Artificial Sequence
  CD33 B10 HL x I2C HL
caggtgcagctggtgcagtctggagctgaggtgaagaagcctggtgagtcagtcaaggtctcctgcaaggctagcgggtataccttcacaaactatggaatgaactgggtgaagcaggctccaggacagggtttagagtggatgggctggataaacacctacactggagagccaacctatgctgataagttccagggacgcgttaccatgactacggatacctctaccagcactgcctatatggaaatccgcaacctcagaagtgatgacacggctgtatattactgtgcgcgctggagttggagtgatggttactacgtttactttgactactggggccaaggcactacggtcaccgtctcctcaggtggtggtggttctggcggcggcggctccggtggtggtggttctgacatcgtgatgacacagtctccagactccctgactgtgtctctgggcgagaggaccaccatcaactgcaagtccagccagagtgttttagacagctccaacaataagaactccttagcttggtaccagcagaaaccaggacagcctcctaaattactcctttcctgggcatctacgcgggaatccgggatccctgaccgattcagtggcagcggttctgggacagatttcactctcactattgacggcctgcagcctgaagattctgcaacttactattgtcaacagtctgcccacttcccgatcacctttggccaagggacacgactggagattaaatccggaggtggtggctccgaggtgcagctggtcgagtctggaggaggattggtgcagcctggagggtcattgaaactctcatgtgcagcctctggattcaccttcaataagtacgccatgaactgggtccgccaggctccaggaaagggtttggaatgggttgctcgcataagaagtaaatataataattatgcaacatattatgccgattcagtgaaagacaggttcaccatctccagagatgattcaaaaaacactgcctatctacaaatgaacaacttgaaaactgaggacactgccgtgtactactgtgtgagacatgggaacttcggtaatagctacatatcctactgggcttactggggccaagggactctggtcaccgtctcctcaggtggtggtggttctggcggcggcggctccggtggtggtggttctcagactgttgtgactcaggaaccttcactcaccgtatcacctggtggaacagtcacactcacttgtggctcctcgactggggctgttacatctggcaactacccaaactgggtccaacaaaaaccaggtcaggcaccccgtggtctaataggtgggactaagttcctcgcccccggtactcctgccagattctcaggctccctgcttggaggcaaggctgccctcaccctctcaggggtacagccagaggatgaggcagaatattactgtgttctatggtacagcaaccgctgggtgttcggtggaggaaccaaactgactgtccta

SEQ ID NO: 299 - protein, 505 aa, Artificial Sequence
  CD33 E11 HL x H2C HL
QVQLVQSGAEVKKPGESVKVSCKASGYTFTNYGMNWVKQAPGQGLEWMGWINTYTGEPTYADKFQGRVTMTTDTSTSTAYMEIRNLGGDDTAVYYCARWSWSDGYYVYFDYWGQGTSVTVSSGGGGSGGGGSGGGGSDIVMTQSPDSLTVSLGERTTINCKSSQSVLDSSTNKNSLAWYQQKPGQPPKLLLSWASTRESGIPDRFSGSGSGTDFTLTIDSPQPEDSATYYCQQSAHFPITFGQGTRLEIKSGGGGSEVQLVESGGGLVQPGGSLKLSCAASGFTFNKYAMNWVRQAPGKGLEWVARIRSKYNNYATYYADSVKDRFTISRDDSKNTAYLQMNNLKTEDTAVYYCVRHGNFGNSYISYWAYWGQGTLVTVSSGGGGSGGGGSGGGGSQTVVTQEPSLTVSPGGTVTLTCGSSTGAVTSGYYPNWVQQKPGQAPRGLIGGTKFLAPGTPARFSGSLLGGKAALTLSGVQPEDEAEYYCALWYSNRWVFGGGTKLTVL

SEQ ID NO: 300 - DNA, 1515 bp, Artificial Sequence
  CD33 E11 HL x H2C HL
caggtgcagctggtgcagtctggagctgaggtgaagaagcctggagagtcagtcaaggtctcctgcaaggctagcgggtataccttcacaaactatggaatgaactgggtgaagcaggctccaggacagggtttagagtggatgggctggataaacacctacactggagagccaacctatgctgataagttccagggacgcgttaccatgactacggatacctctaccagcactgcctatatggaaatccgcaacctcggaggtgatgacacggctgtatattactgtgcgcgctggagttggagtgatggttactacgtttactttgactactggggccaaggcacttcggtcaccgtctcctcaggtggtggtggttctggcggcggcggctccggtggtggtggttctgacatcgtgatgacacagtctccagactccctgactgtgtctctgggcgagaggaccaccatcaactgcaagtccagccagagtgttttagacagctccacgaataagaactccttagcttggtaccagcagaaaccaggacagcctcctaaattactcctttcctgggcatctacgcgggaatccgggatccctgaccgattcagtggcagcgggtctgggacagatttcactctcactattgacagcccgcagcctgaagattctgcaacttactattgtcaacagtctgcccacttcccgatcacctttggccaagggacacgactggagattaaatccggaggtggtggctccgaggtgcagctggtcgagtctggaggaggattggtgcagcctggagggtcattgaaactctcatgtgcagcctctggattcaccttcaataagtacgccatgaactgggtccgccaggctccaggaaagggtttggaatgggttgctcgcataagaagtaaatataataattatgcaacatattatgccgattcagtgaaagacaggttcaccatctccagagatgattcaaaaaacactgcctatctacaaatgaacaacttgaaaactgaggacactgccgtgtactactgtgtgagacatgggaacttcggtaatagctacatatcctactgggcttactggggccaagggactctggtcaccgtctcctcaggtggtggtggttctggcggcggcggctccggtggtggtggttctcagactgttgtgactcaggaaccttcactcaccgtatcacctggtggaacagtcacactcacttgtggctcctcgactggggctgttacatctggctactacccaaactgggtccaacaaaaaccaggtcaggcaccccgtggtctaataggtgggactaagttcctcgcccccggtactcctgccagattctcaggctccctgcttggaggcaaggctgccctcaccctctcaggggtacagccagaggatgaggcagaatattactgtgctctatggtacagcaaccgctgggtgttcggtggaggaaccaaactgactgtccta

SEQ ID NO: 301 - protein, 505 aa, Artificial Sequence
  CD33 E11 HL x F12Q HL
QVQLVQSGAEVKKPGESVKVSCKASGYTFTNYGMNWVKQAPGQGLEWMGWINTYTGEPTYADKFQGRVTMTTDTSTSTAYMEIRNLGGDDTAVYYCARWSWSDGYYVYFDYWGQGTSVTVSSGGGGSGGGGSGGGGSDIVMTQSPDSLTVSLGERTTINCKSSQSVLDSSTNKNSLAWYQQKPGQPPKLLLSWASTRESGIPDRFSGSGSGTDFTLTIDSPQPEDSATYYCQQSAHFPITFGQGTRLEIKSGGGGSEVQLVESGGGLVQPGGSLKLSCAASGFTFNSYAMNWVRQAPGKGLEWVARIRSKYNNYATYYADSVKGRFTISRDDSKNTAYLQMNNLKTEDTAVYYCVRHGNFGNSYVSWWAYWGQGTLVTVSSGGGGSGGGGSGGGGSQTVVTQEPSLTVSPGGTVTLTCGSSTGAVTSGNYPNWVQQKPGQAPRGLIGGTKFLAPGTPARFSGSLLGGKAALTLSGVQPEDEAEYYCVLWYSNRWVFGGGTKLTVL

SEQ ID NO: 302 - DNA, 1515 bp, Artificial Sequence
  CD33 E11 HL x F12Q HL
caggtgcagctggtgcagtctggagctgaggtgaagaagcctggagagtcagtcaaggtctcctgcaaggctagcgggtataccttcacaaactatggaatgaactgggtgaagcaggctccaggacagggtttagagtggatgggctggataaacacctacactggagagccaacctatgctgataagttccagggacgcgttaccatgactacggatacctctaccagcactgcctatatggaaatccgcaacctcggaggtgatgacacggctgtatattactgtgcgcgctggagttggagtgatggttactacgtttactttgactactggggccaaggcacttcggtcaccgtctcctcaggtggtggtggttctggcggcggcggctccggtggtggtggttctgacatcgtgatgacacagtctccagactccctgactgtgtctctgggcgagaggaccaccatcaactgcaagtccagccagagtgttttagacagctccacgaataagaactccttagcttggtaccagcagaaaccaggacagcctcctaaattactcctttcctgggcatctacgcgggaatccgggatccctgaccgattcagtggcagcgggtctgggacagatttcactctcactattgacagcccgcagcctgaagattctgcaacttactattgtcaacagtctgcccacttcccgatcacctttggccaagggacacgactggagattaaatccggaggtggtggctccgaggtgcagctggtcgagtctggaggaggattggtgcagcctggagggtcattgaaactctcatgtgcagcctctggattcaccttcaatagctacgccatgaactgggtccgccaggctccaggaaagggtttggaatgggttgctcgcataagaagtaaatataataattatgcaacatattatgccgattcagtgaaaggcaggttcaccatctccagagatgattcaaaaaacactgcctatctacaaatgaacaacttgaaaactgaggacactgccgtgtactactgtgtgagacatgggaacttcggtaatagctacgtttcctggtgggcttactggggccaagggactctggtcaccgtctcctcaggtggtggtggttctggcggcggcggctccggtggtggtggttctcagactgttgtgactcaggaaccttcactcaccgtatcacctggtggaacagtcacactcacttgtggctcctcgactggggctgttacatctggcaactacccaaactgggtccaacaaaaaccaggtcaggcaccccgtggtctaataggtgggactaagttcctcgcccccggtactcctgccagattctcaggctccctgcttggaggcaaggctgccctcaccctctcaggggtacagccagaggatgaggcagaatattactgtgttctatggtacagcaaccgctgggtgttcggtggaggaaccaaactgactgtccta

SEQ ID NO: 303 - protein, 505 aa, Artificial Sequence
  CD33 E11 HL x I2C HL
QVQLVQSGAEVKKPGESVKVSCKASGYTFTNYGMNWVKQAPGQGLEWMGWINTYTGEPTYADKFQGRVTMTTDTSTSTAYMEIRNLGGDDTAVYYCARWSWSDGYYVYFDYWGQGTSVTVSSGGGGSGGGGSGGGGSDIVMTQSPDSLTVSLGERTTINCKSSQSVLDSSTNKNSLAWYQQKPGQPPKLLLSWASTRESGIPDRFSGSGSGTDFTLTIDSPQPEDSATYYCQQSAHFPITFGQGTRLEIKSGGGGSEVQLVESGGGLVQPGGSLKLSCAASGFTFNKYAMNWVRQAPGKGLEWVARIRSKYNNYATYYADSVKDRFTISRDDSKNTAYLQMNNLKTEDTAVYYCVRHGNFGNSYISYWAYWGQGTLVTVSSGGGGSGGGGSGGGGSQTVVTQEPSLTVSPGGTVTLTCGSSTGAVTSGNYPNWVQQKPGQAPRGLIGGTKFLAPGTPARFSGSLLGGKAALTLSGVQPEDEAEYYCVLWYSNRWVFGGGTKLTVL

SEQ ID NO: 304 - DNA, 1515 bp, Artificial Sequence
  CD33 E11 HL x I2C HL
caggtgcagctggtgcagtctggagctgaggtgaagaagcctggagagtcagtcaaggtctcctgcaaggctagcgggtataccttcacaaactatggaatgaactgggtgaagcaggctccaggacagggtttagagtggatgggctggataaacacctacactggagagccaacctatgctgataagttccagggacgcgttaccatgactacggatacctctaccagcactgcctatatggaaatccgcaacctcggaggtgatgacacggctgtatattactgtgcgcgctggagttggagtgatggttactacgtttactttgactactggggccaaggcacttcggtcaccgtctcctcaggtggtggtggttctggcggcggcggctccggtggtggtggttctgacatcgtgatgacacagtctccagactccctgactgtgtctctgggcgagaggaccaccatcaactgcaagtccagccagagtgttttagacagctccacgaataagaactccttagcttggtaccagcagaaaccaggacagcctcctaaattactcctttcctgggcatctacgcgggaatccgggatccctgaccgattcagtggcagcgggtctgggacagatttcactctcactattgacagcccgcagcctgaagattctgcaacttactattgtcaacagtctgcccacttcccgatcacctttggccaagggacacgactggagattaaatccggaggtggtggctccgaggtgcagctggtcgagtctggaggaggattggtgcagcctggagggtcattgaaactctcatgtgcagcctctggattcaccttcaataagtacgccatgaactgggtccgccaggctccaggaaagggtttggaatgggttgctcgcataagaagtaaatataataattatgcaacatattatgccgattcagtgaaagacaggttcaccatctccagagatgattcaaaaaacactgcctatctacaaatgaacaacttgaaaactgaggacactgccgtgtactactgtgtgagacatgggaacttcggtaatagctacatatcctactgggcttactggggccaagggactctggtcaccgtctcctcaggtggtggtggttctggcggcggcggctccggtggtggtggttctcagactgttgtgactcaggaaccttcactcaccgtatcacctggtggaacagtcacactcacttgtggctcctcgactggggctgttacatctggcaactacccaaactgggtccaacaaaaaccaggtcaggcaccccgtggtctaataggtgggactaagttcctcgcccccggtactcctgccagattctcaggctccctgcttggaggcaaggctgccctcaccctctcaggggtacagccagaggatgaggcagaatattactgtgttctatggtacagcaaccgctgggtgttcggtggaggaaccaaactgactgtccta

SEQ ID NO: 305 - DNA, 1125 bp, Homo sapiens
atgggatggagctgtatcatcctcttcttggtagcaacagctacaggtgtacactccgatccaaatttctggctgcaagtgcaggagtcagtgacggtacaggagggtttgtgcgtcctcgtgccctgcactttcttccatcccataccctactacgacaagaactccccagttcatggttactggttccgggaaggagccattatatccggggactctccagtggccacaaacaagctagatcaagaagtacaggaggagactcagggcagattccgcctccttggggatcccagtaggaacaactgctccctgagcatcgtagacgccaggaggagggataatggttcatacttctttcggatggagagaggaagtaccaaatacagttacaaatctccccagctctctgtgcatgtgacagacttgacccacaggcccaaaatcctcatccctggcactctagaacccggccactccaaaaacctgacctgctctgtgtcctgggcctgtgagcagggaacacccccgatcttctcctggttgtcagctgcccccacctccctgggccccaggactactcactcctcggtgctcataatcaccccacggccccaggaccacggcaccaacctgacctgtcaggtgaagttcgctggagctggtgtgactacggagagaaccatccagctcaacgtcacctatgttccacagaacccaacaactggtatctttccaggagatggctcagggaaacaagagaccagagcaggagtggttcatggggccattggaggagctggtgttacagccctgctcgctctttgtctctgcctcatcttcttcatagtgaagacccacaggaggaaagcagccaggacagcagtgggcaggaatgacacccaccctaccacagggtcagcctccccgaaacaccagaagaagtccaagttacatggccccactgaaacctcaagctgttcaggtgccgcccctactgtggagatggatgaggagctgcattatgcttccctcaactttcatgggatgaatccttccaaggacacctccaccgaatactcagaggtcaggacccagtccgggcatcatcaccatcatcattga

SEQ ID NO: 306 - protein, 374 aa, Homo sapiens
MGWSCIILFLVATATGVHSDPNFWLQVQESVTVQEGLCVLVPCTFFHPIPYYDKNSPVHGYWFREGAIISGDSPVATNKLDQEVQEETQGRFRLLGDPSRNNCSLSIVDARRRDNGSYFFRMERGSTKYSYKSPQLSVHVTDLTHRPKILIPGTLEPGHSKNLTCSVSWACEQGTPPIFSWLSAAPTSLGPRTTHSSVLIITPRPQDHGTNLTCQVKFAGAGVTTERTIQLNVTYVPQNPTTGIFPGDGSGKQETRAGVVHGAIGGAGVTALLALCLCLIFFIVKTHRRKAARTAVGRNDTHPTTGSASPKHQKKSKLHGPTETSSCSGAAPTVEMDEELHYASLNFHGMNPSKDTSTEYSEVRTQSGHHHHHH

SEQ ID NO: 307 - DNA, 1083 bp, Macaca sp.
atgccgctgctgctactgctgcccctgctgtgggcaggggccctggctatggatccaagagtcaggctggaagtgcaggagtcagtgacagtacaggagggtttgtgcgtccttgtgccctgcactttcttccatcccgtaccctaccacaccaggaattccccagttcatggttactggttccgggaaggagccattgtatccttggactctccagtggccacaaacaagctagatcaagaagtacaggaggagacccagggccgattccgcctccttggggatcccagtaggaacaactgctccctgagcatcgtagatgccaggaggagggataacggttcatacttctttcggatggagaaaggaagtaccaaatacagttacaaatctacccagctctctgtgcatgtgacagacttgacccacaggccccaaatcctcatccctggagccctagaccctgaccactccaaaaacctgacctgctctgtgccctgggcctgtgagcagggaacacctccaatcttctcctggatgtcagctgcccccacctccctgggcctcaggaccactcactcctcggtgctcataatcaccccacggccccaggaccacggcaccaacctcacctgtcaggtgaagttccctggagctggcgtgaccacggagagaaccatccagctcaatgtctcctatgcttcacagaacccaagaactgatatctttctaggagacggctcagggaaacaaggagtggttcagggagccatcgggggagctggtgtcacagtcctgctcgctctttgtctctgcctcatcttcttcacagtgaagactcacaggaggaaagcagccaggacagcagtgggcaggatcgacacccaccccgccacagggccaacatcctcgaaacaccagaagaagtccaagttacatggcgccactgaaacctcaggctgttcaggtaccacccttactgtggagatggatgaggagctgcactacgcttccctcaactttcatgggatgaatccttctgaggacacctccaccgaatactcagaggtcaggacccagtga

SEQ ID NO: 308 - protein, 360 aa, Macaca sp.
MPLLLLLPLLWAGALAMDPRVRLEVQESVTVQEGLCVLVPCTFFHPVPYHTRNSPVHGYWFREGAIVSLDSPVATNKLDQEVQEETQGRFRLLGDPSRNNCSLSIVDARRRDNGSYFFRMEKGSTKYSYKSTQLSVHVTDLTHRPQILIPGALDPDHSKNLTCSVPWACEQGTPPIFSWMSAAPTSLGLRTTHSSVLIITPRPQDHGTNLTCQVKFPGAGVTTERTIQLNVSYASQNPRTDIFLGDGSGKQGVVQGAIGGAGVTVLLALCLCLIFFTVKTHRRKAARTAVGRIDTHPATGPTSSKHQKKSKLHGATETSGCSGTTLTVEMDEELHYASLNFHGMNPSEDTSTEYSEVRTQ

SEQ ID NO: 309 - DNA, 843 bp, Artificial Sequence
  1-27 CD3-Fc + Leader
atgggatggagctgtatcatcctcttcttggtagcaacagctacaggtgtacactcccaagatggtaatgaagaaatgggtggtattacacagacaccatataaagtctccatctctggaaccacagtaatattgacatccggagagcccaaatcttgtgacaaaactcacacatgcccaccgtgcccagcacctgaactcctggggggaccgtcagtcttcctcttccccccaaaacccaaggacaccctcatgatctcccggacccctgaggtcacatgcgtggtggtggacgtgagccacgaagaccctgaggtcaagttcaactggtacgtggacggcgtggaggtgcataatgccaagacaaagccgcgggaggagcagtacaacagcacgtaccgtgtggtcagcgtcctcaccgtcctgcaccaggactggctgaatggcaaggagtacaagtgcaaggtctccaacaaagccctcccagcccccatcgagaaaaccatctccaaagccaaagggcagccccgagaaccacaggtgtacaccctgcccccatcccgggaggagatgaccaagaaccaggtcagcctgacctgcctggtcaaaggcttctatcccagcgacatcgccgtggagtgggagagcaatgggcagccggagaacaactacaagaccacgcctcccgtgctggactccgacggctccttcttcctctatagcaagctcaccgtggacaagagcaggtggcagcaggggaacgtcttctcatgctccgtgatgcatgaggctctgcacaaccactacacgcagaagagcctctccctgtccccgggtaaatag

SEQ ID NO: 310 - protein, 280 aa, Artificial Sequence
  1-27 CD3-Fc + Leader
MGWSCIILFLVATATGVHSQDGNEEMGGITQTPYKVSISGTTVILTSGEPKSCDKTHTCPPCPAPELLGGPSVFLFPPKPKDTLMISRTPEVTCVVVDVSHEDPEVKFNWYVDGVEVHNAKTKPREEQYNSTYRVVSVLTVLHQDWLNGKEYKCKVSNKALPAPIEKTISKAKGQPREPQVYTLPPSREEMTKNQVSLTCLVKGFYPSDIAVEWESNGQPENNYKTTPPVLDSDGSFFLYSKLTVDKSRWQQGNVFSCSVMHEALHNHYTQKSLSLSPGK

SEQ ID NO: 311 - protein, 505 aa, Artificial Sequence
  CD33 UD H2C HL x AF5 HL
EVQLVESGGGLVQPGGSLKLSCAASGFTFNKYAMNWVRQAPGKGLEWVARIRSKYNNYATYYADSVKDRFTISRDDSKNTAYLQMNNLKTEDTAVYYCVRHGNFGNSYISYWAYWGQGTLVTVSSGGGGSGGGGSGGGGSQTVVTQEPSLTVSPGGTVTLTCGSSTGAVTSGYYPNWVQQKPGQAPRGLIGGTKFLAPGTPARFSGSLLGGKAALTLSGVQPEDEAEYYCALWYSNRWVFGGGTKLTVLSGGGGSQVQLVQSGAEVKKPGASVKVSCKASGYTFTNYGMNWVKQAPGQGLKWMGWINTYTGEPTYADDFKGRVTMTSDTSTSTAYLELHNLRSDDTAVYYCARWSWSDGYYVYFDYWGQGTTVTVSSGGGGSGGGGSGGGGSDIVMTQSPDSLTVSLGERTTINCKSSQSVLDSSKNKNSLAWYQQKPGQPPKLLLSWASTRESGIPDRFSGSGSGTDFTLTIDSLQPEDSATYYCQQSAHFPITFGQGTRLEIK

SEQ ID NO: 312 - DNA, 1515 bp, Artificial Sequence
  CD33 UD H2C HL x AF5 HL
gaggtgcagctggtcgagtctggaggaggattggtgcagcctggagggtcattgaaactctcatgtgcagcctctggattcaccttcaataagtacgccatgaactgggtccgccaggctccaggaaagggtttggaatgggttgctcgcataagaagtaaatataataattatgcaacatattatgccgattcagtgaaagacaggttcaccatctccagagatgattcaaaaaacactgcctatctacaaatgaacaacttgaaaactgaggacactgccgtgtactactgtgtgagacatgggaacttcggtaatagctacatatcctactgggcttactggggccaagggactctggtcaccgtctcctcaggtggtggtggttctggcggcggcggctccggtggtggtggttctcagactgttgtgactcaggaaccttcactcaccgtatcacctggtggaacagtcacactcacttgtggctcctcgactggggctgttacatctggctactacccaaactgggtccaacaaaaaccaggtcaggcaccccgtggtctaataggtgggactaagttcctcgcccccggtactcctgccagattctcaggctccctgcttggaggcaaggctgccctcaccctctcaggggtacagccagaggatgaggcagaatattactgtgctctatggtacagcaaccgctgggtgttcggtggaggaaccaaactgactgtcctatccggaggtggtggctcccaggtgcagctggtccagtctggagctgaggtgaagaagcctggagcgtcagtcaaggtctcctgcaaggctagcgggtataccttcacaaactatggaatgaactgggtgaagcaggctccaggacagggtttaaagtggatgggctggataaacacctacactggagagccaacatatgctgatgacttcaagggacgggttaccatgacttcggatacctctaccagcactgcctatttggaactccacaacctcagaagtgatgacacggctgtatattactgtgcgcgctggagttggagtgatggttactacgtttactttgactactggggccaaggcactacggtcaccgtctcctcaggtggtggtggttctggcggcggcggctccggtggtggtggttctgacatcgtgatgacacagtctccagactccctgactgtgtctctgggcgagaggaccaccatcaactgcaagtccagccagagtgttttagacagctccaagaataagaactccttagcttggtaccagcagaaaccaggacagcctcctaaattactcctttcctgggcatctacgcgggaatccgggatccctgaccgattcagtggcagcgggtctgggacagatttcactctcactattgacagcctgcagcctgaagattctgcaacttactattgtcaacagtctgcccacttcccgatcacctttggccaagggacacgactggagattaaa

SEQ ID NO: 313 - protein, 505 aa, Artificial Sequence
  CD33 UD F12Q HL x AF5 HL
EVQLVESGGGLVQPGGSLKLSCAASGFTFNSYAMNWVRQAPGKGLEWVARIRSKYNNYATYYADSVKGRFTISRDDSKNTAYLQMNNLKTEDTAVYYCVRHGNFGNSYVSWWAYWGQGTLVTVSSGGGGSGGGGSGGGGSQTVVTQEPSLTVSPGGTVTLTCGSSTGAVTSGNYPNWVQQKPGQAPRGLIGGTKFLAPGTPARFSGSLLGGKAALTLSGVQPEDEAEYYCVLWYSNRWVFGGGTKLTVLSGGGGSQVQLVQSGAEVKKPGASVKVSCKASGYTFTNYGMNWVKQAPGQGLKWMGWINTYTGEPTYADDFKGRVTMTSDTSTSTAYLELHNLRSDDTAVYYCARWSWSDGYYVYFDYWGQGTTVTVSSGGGGSGGGGSGGGGSDIVMTQSPDSLTVSLGERTTINCKSSQSVLDSSKNKNSLAWYQQKPGQPPKLLLSWASTRESGIPDRFSGSGSGTDFTLTIDSLQPEDSATYYCQQSAHFPITFGQGTRLEIK

SEQ ID NO: 314 - DNA, 1515 bp, Artificial Sequence
  CD33 UD F12Q HL x AF5 HL
gaggtgcagctggtcgagtctggaggaggattggtgcagcctggagggtcattgaaactctcatgtgcagcctctggattcaccttcaatagctacgccatgaactgggtccgccaggctccaggaaagggtttggaatgggttgctcgcataagaagtaaatataataattatgcaacatattatgccgattcagtgaaaggcaggttcaccatctccagagatgattcaaaaaacactgcctatctacaaatgaacaacttgaaaactgaggacactgccgtgtactactgtgtgagacatgggaacttcggtaatagctacgtttcctggtgggcttactggggccaagggactctggtcaccgtctcctcaggtggtggtggttctggcggcggcggctccggtggtggtggttctcagactgttgtgactcaggaaccttcactcaccgtatcacctggtggaacagtcacactcacttgtggctcctcgactggggctgttacatctggcaactacccaaactgggtccaacaaaaaccaggtcaggcaccccgtggtctaataggtgggactaagttcctcgcccccggtactcctgccagattctcaggctccctgcttggaggcaaggctgccctcaccctctcaggggtacagccagaggatgaggcagaatattactgtgttctatggtacagcaaccgctgggtgttcggtggaggaaccaaactgactgtcctatccggaggtggtggctcccaggtgcagctggtccagtctggagctgaggtgaagaagcctggagcgtcagtcaaggtctcctgcaaggctagcgggtataccttcacaaactatggaatgaactgggtgaagcaggctccaggacagggtttaaagtggatgggctggataaacacctacactggagagccaacatatgctgatgacttcaagggacgggttaccatgacttcggatacctctaccagcactgcctatttggaactccacaacctcagaagtgatgacacggctgtatattactgtgcgcgctggagttggagtgatggttactacgtttactttgactactggggccaaggcactacggtcaccgtctcctcaggtggtggtggttctggcggcggcggctccggtggtggtggttctgacatcgtgatgacacagtctccagactccctgactgtgtctctgggcgagaggaccaccatcaactgcaagtccagccagagtgttttagacagctccaagaataagaactccttagcttggtaccagcagaaaccaggacagcctcctaaattactcctttcctgggcatctacgcgggaatccgggatccctgaccgattcagtggcagcgggtctgggacagatttcactctcactattgacagcctgcagcctgaagattctgcaacttactattgtcaacagtctgcccacttcccgatcacctttggccaagggacacgactggagattaaa

SEQ ID NO: 315 - protein, 505 aa, Artificial Sequence
  CD33 UD I2C HL x AF5 HL
EVQLVESGGGLVQPGGSLKLSCAASGFTFNKYAMNWVRQAPGKGLEWVARIRSKYNNYATYYADSVKDRFTISRDDSKNTAYLQMNNLKTEDTAVYYCVRHGNFGNSYISYWAYWGQGTLVTVSSGGGGSGGGGSGGGGSQTVVTQEPSLTVSPGGTVTLTCGSSTGAVTSGNYPNWVQQKPGQAPRGLIGGTKFLAPGTPARFSGSLLGGKAALTLSGVQPEDEAEYYCVLWYSNRWVFGGGTKLTVLSGGGGSQVQLVQSGAEVKKPGASVKVSCKASGYTFTNYGMNWVKQAPGQGLKWMGWINTYTGEPTYADDFKGRVTMTSDTSTSTAYLELHNLRSDDTAVYYCARWSWSDGYYVYFDYWGQGTTVTVSSGGGGSGGGGSGGGGSDIVMTQSPDSLTVSLGERTTINCKSSQSVLDSSKNKNSLAWYQQKPGQPPKLLLSWASTRESGIPDRFSGSGSGTDFTLTIDSLQPEDSATYYCQQSAHFPITFGQGTRLEIK

SEQ ID NO: 316 - DNA, 1515 bp, Artificial Sequence
  CD33 UD I2C HL x AF5 HL
gaggtgcagctggtcgagtctggaggaggattggtgcagcctggagggtcattgaaactctcatgtgcagcctctggattcaccttcaataagtacgccatgaactgggtccgccaggctccaggaaagggtttggaatgggttgctcgcataagaagtaaatataataattatgcaacatattatgccgattcagtgaaagacaggttcaccatctccagagatgattcaaaaaacactgcctatctacaaatgaacaacttgaaaactgaggacactgccgtgtactactgtgtgagacatgggaacttcggtaatagctacatatcctactgggcttactggggccaagggactctggtcaccgtctcctcaggtggtggtggttctggcggcggcggctccggtggtggtggttctcagactgttgtgactcaggaaccttcactcaccgtatcacctggtggaacagtcacactcacttgtggctcctcgactggggctgttacatctggcaactacccaaactgggtccaacaaaaaccaggtcaggcaccccgtggtctaataggtgggactaagttcctcgcccccggtactcctgccagattctcaggctccctgcttggaggcaaggctgccctcaccctctcaggggtacagccagaggatgaggcagaatattactgtgttctatggtacagcaaccgctgggtgttcggtggaggaaccaaactgactgtcctatccggaggtggtggctcccaggtgcagctggtccagtctggagctgaggtgaagaagcctggagcgtcagtcaaggtctcctgcaaggctagcgggtataccttcacaaactatggaatgaactgggtgaagcaggctccaggacagggtttaaagtggatgggctggataaacacctacactggagagccaacatatgctgatgacttcaagggacgggttaccatgacttcggatacctctaccagcactgcctatttggaactccacaacctcagaagtgatgacacggctgtatattactgtgcgcgctggagttggagtgatggttactacgtttactttgactactggggccaaggcactacggtcaccgtctcctcaggtggtggtggttctggcggcggcggctccggtggtggtggttctgacatcgtgatgacacagtctccagactccctgactgtgtctctgggcgagaggaccaccatcaactgcaagtccagccagagtgttttagacagctccaagaataagaactccttagcttggtaccagcagaaaccaggacagcctcctaaattactcctttcctgggcatctacgcgggaatccgggatccctgaccgattcagtggcagcgggtctgggacagatttcactctcactattgacagcctgcagcctgaagattctgcaacttactattgtcaacagtctgcccacttcccgatcacctttggccaagggacacgactggagattaaa

SEQ ID NO: 317 - protein, 500 aa, Artificial Sequence
  MCSP-A9 HL x H2C HL
QVQLVQSGAEVKKPGASVKVSCKASGYPFTGYYMHWVRQAPGQGLEWMGWINPNSGGTNYAQKFQGRVTITADESTSTAYMELSRLRSDDTAVYYCAKSWVSWFASWGQGTLVTVSSGGGGSGGGGSGGGGSDIVMTQSPDSLAVSLGERATINCKSSQSVLSSSNNKNYLNWYQQKPGQPPKLLIYWASTRESGVPDRFSGSGSGTDFTLTISSLQAEDVAVYYCQQHFNTPFAFGQGTKLEIKSGGGGSEVQLVESGGGLVQPGGSLKLSCAASGFTFNKYAMNWVRQAPGKGLEWVARIRSKYNNYATYYADSVKDRFTISRDDSKNTAYLQMNNLKTEDTAVYYCVRHGNFGNSYISYWAYWGQGTLVTVSSGGGGSGGGGSGGGGSQTVVTQEPSLTVSPGGTVTLTCGSSTGAVTSGYYPNWVQQKPGQAPRGLIGGTKFLAPGTPARFSGSLLGGKAALTLSGVQPEDEAEYYCALWYSNRWVFGGGTKLTVL

SEQ ID NO: 318 - DNA, 1500 bp, Artificial Sequence
  MCSP-A9 HL x H2C HL
caggtgcagctggtccagtctggggctgaggtgaagaagcctggggcctcagtgaaggtctcctgcaaggcttctggataccccttcaccggctactacatgcactgggtgcgacaggcccctggacaagggcttgagtggatgggatggatcaaccctaacagtggtggcacaaactatgcacagaagtttcagggcagagtcacgattaccgcggacgaatccacgagcacagcctacatggagctgagcaggctgagatctgacgacacggccgtgtattactgtgcgaaatcctgggtctcctggtttgcttcctggggtcaaggaaccttggtcaccgtctcctcaggtggtggtggttctggcggcggcggctccggtggtggtggttctgacatcgtgatgacacagtctccagactccctggctgtgtctctgggcgagagggccaccatcaactgcaagtccagccagagtgtcttatccagctccaacaataagaactacttaaattggtaccagcagaaaccaggacagcctcctaagttgctcatttactgggcatctacccgggaatccggggtccctgaccgattcagtggcagcgggtctgggacagatttcactctcaccatcagcagcctgcaggctgaagatgtggcggtttattactgtcaacaacattttaatactccgttcgcttttggccaggggaccaagctggagatcaaatccggaggtggtggatccgaggtgcagctggtcgagtctggaggaggattggtgcagcctggagggtcattgaaactctcatgtgcagcctctggattcaccttcaataagtacgccatgaactgggtccgccaggctccaggaaagggtttggaatgggttgctcgcataagaagtaaatataataattatgcaacatattatgccgattcagtgaaagacaggttcaccatctccagagatgattcaaaaaacactgcctatctacaaatgaacaacttgaaaactgaggacactgccgtgtactactgtgtgagacatgggaacttcggtaatagctacatatcctactgggcttactggggccaagggactctggtcaccgtctcctcaggtggtggtggttctggcggcggcggctccggtggtggtggttctcagactgttgtgactcaggaaccttcactcaccgtatcacctggtggaacagtcacactcacttgtggctcctcgactggggctgttacatctggctactacccaaactgggtccaacaaaaaccaggtcaggcaccccgtggtctaataggtgggactaagttcctcgcccccggtactcctgccagattctcaggctccctgcttggaggcaaggctgccctcaccctctcaggggtacagccagaggatgaggcagaatattactgtgctctatggtacagcaaccgctgggtgttcggtggaggaaccaaactgactgtccta

SEQ ID NO: 319 - protein, 500 aa, Artificial Sequence
  MCSP-A9 HL x F12Q HL
QVQLVQSGAEVKKPGASVKVSCKASGYPFTGYYMHWVRQAPGQGLEWMGWINPNSGGTNYAQKFQGRVTITADESTSTAYMELSRLRSDDTAVYYCAKSWVSWFASWGQGTLVTVSSGGGGSGGGGSGGGGSDIVMTQSPDSLAVSLGERATINCKSSQSVLSSSNNKNYLNWYQQKPGQPPKLLIYWASTRESGVPDRFSGSGSGTDFTLTISSLQAEDVAVYYCQQHFNTPFAFGQGTKLEIKSGGGGSEVQLVESGGGLVQPGGSLKLSCAASGFTFNSYAMNWVRQAPGKGLEWVARIRSKYNNYATYYADSVKGRFTISRDDSKNTAYLQMNNLKTEDTAVYYCVRHGNFGNSYVSWWAYWGQGTLVTVSSGGGGSGGGGSGGGGSQTVVTQEPSLTVSPGGTVTLTCGSSTGAVTSGNYPNWVQQKPGQAPRGLIGGTKFLAPGTPARFSGSLLGGKAALTLSGVQPEDEAEYYCVLWYSNRWVFGGGTKLTVL

SEQ ID NO: 320 - DNA, 1500 bp, Artificial Sequence
  MCSP-A9 HL x F12Q HL
caggtgcagctggtccagtctggggctgaggtgaagaagcctggggcctcagtgaaggtctcctgcaaggcttctggataccccttcaccggctactacatgcactgggtgcgacaggcccctggacaagggcttgagtggatgggatggatcaaccctaacagtggtggcacaaactatgcacagaagtttcagggcagagtcacgattaccgcggacgaatccacgagcacagcctacatggagctgagcaggctgagatctgacgacacggccgtgtattactgtgcgaaatcctgggtctcctggtttgcttcctggggtcaaggaaccttggtcaccgtctcctcaggtggtggtggttctggcggcggcggctccggtggtggtggttctgacatcgtgatgacacagtctccagactccctggctgtgtctctgggcgagagggccaccatcaactgcaagtccagccagagtgtcttatccagctccaacaataagaactacttaaattggtaccagcagaaaccaggacagcctcctaagttgctcatttactgggcatctacccgggaatccggggtccctgaccgattcagtggcagcgggtctgggacagatttcactctcaccatcagcagcctgcaggctgaagatgtggcggtttattactgtcaacaacattttaatactccgttcgcttttggccaggggaccaagctggagatcaaatccggaggtggtggatccgaggtgcagctggtcgagtctggaggaggattggtgcagcctggagggtcattgaaactctcatgtgcagcctctggattcaccttcaatagctacgccatgaactgggtccgccaggctccaggaaagggtttggaatgggttgctcgcataagaagtaaatataataattatgcaacatattatgccgattcagtgaaaggcaggttcaccatctccagagatgattcaaaaaacactgcctatctacaaatgaacaacttgaaaactgaggacactgccgtgtactactgtgtgagacatgggaacttcggtaatagctacgtttcctggtgggcttactggggccaagggactctggtcaccgtctcctcaggtggtggtggttctggcggcggcggctccggtggtggtggttctcagactgttgtgactcaggaaccttcactcaccgtatcacctggtggaacagtcacactcacttgtggctcctcgactggggctgttacatctggcaactacccaaactgggtccaacaaaaaccaggtcaggcaccccgtggtctaataggtgggactaagttcctcgcccccggtactcctgccagattctcaggctccctgcttggaggcaaggctgccctcaccctctcaggggtacagccagaggatgaggcagaatattactgtgttctatggtacagcaaccgctgggtgttcggtggaggaaccaaactgactgtccta

SEQ ID NO: 321 - protein, 500 aa, Artificial Sequence
  MCSP-A9 HL x I2C HL
QVQLVQSGAEVKKPGASVKVSCKASGYPFTGYYMHWVRQAPGQGLEWMGWINPNSGGTNYAQKFQGRVTITADESTSTAYMELSRLRSDDTAVYYCAKSWVSWFASWGQGTLVTVSSGGGGSGGGGSGGGGSDIVMTQSPDSLAVSLGERATINCKSSQSVLSSSNNKNYLNWYQQKPGQPPKLLIYWASTRESGVPDRFSGSGSGTDFTLTISSLQAEDVAVYYCQQHFNTPFAFGQGTKLEIKSGGGGSEVQLVESGGGLVQPGGSLKLSCAASGFTFNKYAMNWVRQAPGKGLEWVARIRSKYNNYATYYADSVKDRFTISRDDSKNTAYLQMNNLKTEDTAVYYCVRHGNFGNSYISYWAYWGQGTLVTVSSGGGGSGGGGSGGGGSQTVVTQEPSLTVSPGGTVTLTCGSSTGAVTSGNYPNWVQQKPGQAPRGLIGGTKFLAPGTPARFSGSLLGGKAALTLSGVQPEDEAEYYCVLWYSNRWVFGGGTKLTVL

SEQ ID NO: 322 - DNA, 1500 bp, Artificial Sequence
  MCSP-A9 HL x I2C HL
caggtgcagctggtccagtctggggctgaggtgaagaagcctggggcctcagtgaaggtctcctgcaaggcttctggataccccttcaccggctactacatgcactgggtgcgacaggcccctggacaagggcttgagtggatgggatggatcaaccctaacagtggtggcacaaactatgcacagaagtttcagggcagagtcacgattaccgcggacgaatccacgagcacagcctacatggagctgagcaggctgagatctgacgacacggccgtgtattactgtgcgaaatcctgggtctcctggtttgcttcctggggtcaaggaaccttggtcaccgtctcctcaggtggtggtggttctggcggcggcggctccggtggtggtggttctgacatcgtgatgacacagtctccagactccctggctgtgtctctgggcgagagggccaccatcaactgcaagtccagccagagtgtcttatccagctccaacaataagaactacttaaattggtaccagcagaaaccaggacagcctcctaagttgctcatttactgggcatctacccgggaatccggggtccctgaccgattcagtggcagcgggtctgggacagatttcactctcaccatcagcagcctgcaggctgaagatgtggcggtttattactgtcaacaacattttaatactccgttcgcttttggccaggggaccaagctggagatcaaatccggaggtggtggatccgaggtgcagctggtcgagtctggaggaggattggtgcagcctggagggtcattgaaactctcatgtgcagcctctggattcaccttcaataagtacgccatgaactgggtccgccaggctccaggaaagggtttggaatgggttgctcgcataagaagtaaatataataattatgcaacatattatgccgattcagtgaaagacaggttcaccatctccagagatgattcaaaaaacactgcctatctacaaatgaacaacttgaaaactgaggacactgccgtgtactactgtgtgagacatgggaacttcggtaatagctacatatcctactgggcttactggggccaagggactctggtcaccgtctcctcaggtggtggtggttctggcggcggcggctccggtggtggtggttctcagactgttgtgactcaggaaccttcactcaccgtatcacctggtggaacagtcacactcacttgtggctcctcgactggggctgttacatctggcaactacccaaactgggtccaacaaaaaccaggtcaggcaccccgtggtctaataggtgggactaagttcctcgcccccggtactcctgccagattctcaggctccctgcttggaggcaaggctgccctcaccctctcaggggtacagccagaggatgaggcagaatattactgtgttctatggtacagcaaccgctgggtgttcggtggaggaaccaaactgactgtccta

SEQ ID NO: 323 - protein, 500 aa, Artificial Sequence
  MCSP-C8 HL x I2C HL
QVQLVQSGAEVKRPGASMKVSCKASGYTFTNYYIHWVRQAPGQGLEWMGWINPNSGATNYAQKFQGRVTMTRDTSTSTVYMELSSLRSEDTAVYYCAKSWVSWFASWGQGTLVTVSSGGGGSGGGGSGGGGSDIVMTQSPDSLAVSLGERATINCKSSQSVLNSKNNRNYLAWYQQKPGQPPKLLIYWASTRESGVPDRFSGSGSGTDFTLTISGLQAEDVAVYYCQQHYSTPFTFGPGTKVDIKSGGGGSEVQLVESGGGLVQPGGSLKLSCAASGFTFNKYAMNWVRQAPGKGLEWVARIRSKYNNYATYYADSVKDRFTISRDDSKNTAYLQMNNLKTEDTAVYYCVRHGNFGNSYISYWAYWGQGTLVTVSSGGGGSGGGGSGGGGSQTVVTQEPSLTVSPGGTVTLTCGSSTGAVTSGNYPNWVQQKPGQAPRGLIGGTKFLAPGTPARFSGSLLGGKAALTLSGVQPEDEAEYYCVLWYSNRWVFGGGTKLTVL

SEQ ID NO: 324 - DNA, 1500 bp, Artificial Sequence
  MCSP-C8 HL x I2C HL
caggtgcagctggtccagtctggggctgaggtgaagaggcctggggcctcaatgaaggtctcctgcaaggcttctgggtacaccttcaccaactactatatacactgggtgcgacaggcccctggacaaggtcttgagtggatgggttggatcaaccctaacagtggtgccacaaactatgcacagaagttccagggcagagtcaccatgaccagggacacgtccacgagcacagtctacatggagctgagcagcctgagatctgaggacacggccgtgtattactgtgcgaaatcctgggtctcctggtttgcttcctggggtcaaggaaccttggtcaccgtctcctcaggtggtggtggttctggcggcggcggctccggtggtggtggttctgacatcgtgatgacccagtctccagactccctggctgtgtctctgggcgagagggccaccatcaactgcaagtccagccagagtgttttaaacagcaagaacaataggaactacttagcttggtaccagcagaaaccaggacagcctcctaagctgctcatttactgggcatctacccgggaatccggggtccctgaccgattcagtggcagcgggtctgggacagatttcactctcaccatcagtggcctgcaggctgaagatgtggcagtttattactgtcagcaacattatagtactccattcacttttggccctgggaccaaagtggatatcaaatccggaggtggtggatccgaggtgcagctggtcgagtctggaggaggattggtgcagcctggagggtcattgaaactctcatgtgcagcctctggattcaccttcaataagtacgccatgaactgggtccgccaggctccaggaaagggtttggaatgggttgctcgcataagaagtaaatataataattatgcaacatattatgccgattcagtgaaagacaggttcaccatctccagagatgattcaaaaaacactgcctatctacaaatgaacaacttgaaaactgaggacactgccgtgtactactgtgtgagacatgggaacttcggtaatagctacatatcctactgggcttactggggccaagggactctggtcaccgtctcctcaggtggtggtggttctggcggcggcggctccggtggtggtggttctcagactgttgtgactcaggaaccttcactcaccgtatcacctggtggaacagtcacactcacttgtggctcctcgactggggctgttacatctggcaactacccaaactgggtccaacaaaaaccaggtcaggcaccccgtggtctaataggtgggactaagttcctcgcccccggtactcctgccagattctcaggctccctgcttggaggcaaggctgccctcaccctctcaggggtacagccagaggatgaggcagaatattactgtgttctatggtacagcaaccgctgggtgttcggtggaggaaccaaactgactgtccta

SEQ ID NO: 325 - protein, 500 aa, Artificial Sequence
  MCSP-B8 HL x I2C HL
QVQLVQSGAEVKRPGASMKVSCKASGYTFTNYYIHWVRQAPGQGLEWMGWINPNSGATNYAQKFQGRVTMTRDTSTSTVYMELSSLRSEDTAVYYCAKSWVSWFASWGQGTLVTVSSGGGGSGGGGSGGGGSDIVMTQSPDSLTVSPGERATINCKSSQSVLNSKNNRNYLAWYQQKPGQPPKLLIYWASTRESGVPDRFSGSGSGTDFTLTIDSLQPEDSATYYCQQHYSTPFTFGQGTRLEIKSGGGGSEVQLVESGGGLVQPGGSLKLSCAASGFTFNKYAMNWVRQAPGKGLEWVARIRSKYNNYATYYADSVKDRFTISRDDSKNTAYLQMNNLKTEDTAVYYCVRHGNFGNSYISYWAYWGQGTLVTVSSGGGGSGGGGSGGGGSQTVVTQEPSLTVSPGGTVTLTCGSSTGAVTSGNYPNWVQQKPGQAPRGLIGGTKFLAPGTPARFSGSLLGGKAALTLSGVQPEDEAEYYCVLWYSNRWVFGGGTKLTVL

SEQ ID NO: 326 - DNA, 1500 bp, Artificial Sequence
  MCSP-B8 HL x I2C HL
caggtgcagctggtccagtctggggctgaggtgaagaggcctggggcctcaatgaaggtctcctgcaaggcttctgggtacaccttcaccaactactatatacactgggtgcgacaggcccctggacaaggtcttgagtggatgggttggatcaaccctaacagtggtgccacaaactatgcacagaagttccagggcagagtcaccatgaccagggacacgtccacgagcacagtctacatggagctgagcagcctgagatctgaggacacggccgtgtattactgtgcgaaatcctgggtctcctggtttgcttcctggggtcaaggaaccttggtcaccgtctcctcaggtggtggtggttctggcggcggcggctccggtggtggtggttctgacatcgtgatgacccagtctccagactccctgactgtgtctccgggcgagagggccaccatcaactgcaagtccagccagagtgttttaaacagcaagaacaataggaactacttagcttggtaccagcagaaaccaggacagcctcctaagctgctcatttactgggcatctacccgggaatccggggtccctgaccgattcagtggcagcgggtctgggacagatttcactctcaccatcgattccctgcagcctgaagatagtgcaacttattactgtcagcaacattatagtactccattcacttttggccaggggaccagactggagatcaaatccggaggtggtggatccgaggtgcagctggtcgagtctggaggaggattggtgcagcctggagggtcattgaaactctcatgtgcagcctctggattcaccttcaataagtacgccatgaactgggtccgccaggctccaggaaagggtttggaatgggttgctcgcataagaagtaaatataataattatgcaacatattatgccgattcagtgaaagacaggttcaccatctccagagatgattcaaaaaacactgcctatctacaaatgaacaacttgaaaactgaggacactgccgtgtactactgtgtgagacatgggaacttcggtaatagctacatatcctactgggcttactggggccaagggactctggtcaccgtctcctcaggtggtggtggttctggcggcggcggctccggtggtggtggttctcagactgttgtgactcaggaaccttcactcaccgtatcacctggtggaacagtcacactcacttgtggctcctcgactggggctgttacatctggcaactacccaaactgggtccaacaaaaaccaggtcaggcaccccgtggtctaataggtgggactaagttcctcgcccccggtactcctgccagattctcaggctccctgcttggaggcaaggctgccctcaccctctcaggggtacagccagaggatgaggcagaatattactgtgttctatggtacagcaaccgctgggtgttcggtggaggaaccaaactgactgtccta

SEQ ID NO: 327 - protein, 500 aa, Artificial Sequence
  MCSP-B7 HL x I2C HL
QVQLVQSGAEVKRPGASMKVSCKASGYTFTNYYIHWVRQAPGQGLEWMGWINPNSGATNYAQKFQGRVTMTRDTSTSTVYMELSSLRSEDTAVYYCAKSWVSWFASWGQGTLVTVSSGGGGSGGGGSGGGGSDIVMTQSPDSLTVSLGERTTINCKSSQSVLNSKNNRNYLAWYQQKPGQPPKLLIYWASTRESGVPDRFSGSGSGTDFTLTIDSLQPEDIATYYCQQHYSTPFTFGQGTRLEIKSGGGGSEVQLVESGGGLVQPGGSLKLSCAASGFTFNKYAMNWVRQAPGKGLEWVARIRSKYNNYATYYADSVKDRFTISRDDSKNTAYLQMNNLKTEDTAVYYCVRHGNFGNSYISYWAYWGQGTLVTVSSGGGGSGGGGSGGGGSQTVVTQEPSLTVSPGGTVTLTCGSSTGAVTSGNYPNWVQQKPGQAPRGLIGGTKFLAPGTPARFSGSLLGGKAALTLSGVQPEDEAEYYCVLWYSNRWVFGGGTKLTVL

SEQ ID NO: 328 - DNA, 1500 bp, Artificial Sequence
  MCSP-B7 HL x I2C HL
caggtgcagctggtccagtctggggctgaggtgaagaggcctggggcctcaatgaaggtctcctgcaaggcttctgggtacaccttcaccaactactatatacactgggtgcgacaggcccctggacaaggtcttgagtggatgggttggatcaaccctaacagtggtgccacaaactatgcacagaagttccagggcagagtcaccatgaccagggacacgtccacgagcacagtctacatggagctgagcagcctgagatctgaggacacggccgtgtattactgtgcgaaatcctgggtctcctggtttgcttcctggggtcaaggaaccttggtcaccgtctcctcaggtggtggtggttctggcggcggcggctccggtggtggtggttctgacatcgtgatgacccagtctccagactccctgactgtgtctctgggcgagaggaccaccatcaactgcaagtccagccagagtgttttaaacagcaagaacaataggaactacttagcttggtaccagcagaaaccaggacagcctcctaagctgctcatttactgggcatctacccgggaatccggggtccctgaccgattcagtggcagcgggtctgggacagatttcactctcaccatcgattccctgcagcctgaagatattgcaacttattactgtcagcaacattatagtactccattcacttttggccaggggaccagactggagatcaaatccggaggtggtggatccgaggtgcagctggtcgagtctggaggaggattggtgcagcctggagggtcattgaaactctcatgtgcagcctctggattcaccttcaataagtacgccatgaactgggtccgccaggctccaggaaagggtttggaatgggttgctcgcataagaagtaaatataataattatgcaacatattatgccgattcagtgaaagacaggttcaccatctccagagatgattcaaaaaacactgcctatctacaaatgaacaacttgaaaactgaggacactgccgtgtactactgtgtgagacatgggaacttcggtaatagctacatatcctactgggcttactggggccaagggactctggtcaccgtctcctcaggtggtggtggttctggcggcggcggctccggtggtggtggttctcagactgttgtgactcaggaaccttcactcaccgtatcacctggtggaacagtcacactcacttgtggctcctcgactggggctgttacatctggcaactacccaaactgggtccaacaaaaaccaggtcaggcaccccgtggtctaataggtgggactaagttcctcgcccccggtactcctgccagattctcaggctccctgcttggaggcaaggctgccctcaccctctcaggggtacagccagaggatgaggcagaatattactgtgttctatggtacagcaaccgctgggtgttcggtggaggaaccaaactgactgtccta

SEQ ID NO: 329 - protein, 500 aa, Artificial Sequence
  MCSP-G8 HL x I2C HL
QVQLVQSGAEVKRPGASMKVSCKASGYTFTNYYIHWVRQAPGQGLEWMGWINPNSGATNYAQKFQGRVTMTRDTSTSTVYMELSSLRSEDTAVYYCAKSWVSWFASWGQGTLVTVSSGGGGSGGGGSGGGGSDIVMTQSPDSLTVSLGERATINCKSSQSVLNSKNNRNYLAWYQQKPGQPPKLLIYWASTRESGVPDRFSGSGSGTDFTLTIDSLQPEDSATYYCQQHYSTPFTFGQGTRLEIKSGGGGSEVQLVESGGGLVQPGGSLKLSCAASGFTFNKYAMNWVRQAPGKGLEWVARIRSKYNNYATYYADSVKDRFTISRDDSKNTAYLQMNNLKTEDTAVYYCVRHGNFGNSYISYWAYWGQGTLVTVSSGGGGSGGGGSGGGGSQTVVTQEPSLTVSPGGTVTLTCGSSTGAVTSGNYPNWVQQKPGQAPRGLIGGTKFLAPGTPARFSGSLLGGKAALTLSGVQPEDEAEYYCVLWYSNRWVFGGGTKLTVL

SEQ ID NO: 330 - DNA, 1500 bp, Artificial Sequence
  MCSP-G8 HL x I2C HL
caggtgcagctggtccagtctggggctgaggtgaagaggcctggggcctcaatgaaggtctcctgcaaggcttctgggtacaccttcaccaactactatatacactgggtgcgacaggcccctggacaaggtcttgagtggatgggttggatcaaccctaacagtggtgccacaaactatgcacagaagttccagggcagagtcaccatgaccagggacacgtccacgagcacagtctacatggagctgagcagcctgagatctgaggacacggccgtgtattactgtgcgaaatcctgggtctcctggtttgcttcctggggtcaaggaaccttggtcaccgtctcctcaggtggtggtggttctggcggcggcggctccggtggtggtggttctgacatcgtgatgacccagtctccagactccctgactgtgtctctgggcgagagggccaccatcaactgcaagtccagccagagtgttttaaacagcaagaacaataggaactacttagcttggtaccagcagaaaccaggacagcctcctaagctgctcatttactgggcatctacccgggaatccggggtccctgaccgattcagtggcagcgggtctgggacagatttcactctcaccatcgattccctgcagcctgaagatagtgcaacttattactgtcagcaacattatagtactccattcacttttggccaggggaccagactggagatcaaatccggaggtggtggatccgaggtgcagctggtcgagtctggaggaggattggtgcagcctggagggtcattgaaactctcatgtgcagcctctggattcaccttcaataagtacgccatgaactgggtccgccaggctccaggaaagggtttggaatgggttgctcgcataagaagtaaatataataattatgcaacatattatgccgattcagtgaaagacaggttcaccatctccagagatgattcaaaaaacactgcctatctacaaatgaacaacttgaaaactgaggacactgccgtgtactactgtgtgagacatgggaacttcggtaatagctacatatcctactgggcttactggggccaagggactctggtcaccgtctcctcaggtggtggtggttctggcggcggcggctccggtggtggtggttctcagactgttgtgactcaggaaccttcactcaccgtatcacctggtggaacagtcacactcacttgtggctcctcgactggggctgttacatctggcaactacccaaactgggtccaacaaaaaccaggtcaggcaccccgtggtctaataggtgggactaagttcctcgcccccggtactcctgccagattctcaggctccctgcttggaggcaaggctgccctcaccctctcaggggtacagccagaggatgaggcagaatattactgtgttctatggtacagcaaccgctgggtgttcggtggaggaaccaaactgactgtccta

SEQ ID NO: 331 - protein, 500 aa, Artificial Sequence
  MCSP-D5 HL x I2C HL
QVQLVQSGAEVKRPGASMKVSCKASGYTFTNYYIHWVRQAPGQGLEWMGWINPNSGATNYAQKFQGRVTMTRDTSTSTVYMELSSLRSEDTAVYYCAKSWVSWFASWGQGTLVTVSSGGGGSGGGGSGGGGSDIVMTQSPDSLAVSLGERATINCKSSQSVLNSKNNRNYLAWYQQKPGQPPKLLIYWASTRESGVPDRFSGSGSGTDFTLTIDSLQAEDSATYYCQQHYSTPFTFGQGTRLEIKSGGGGSEVQLVESGGGLVQPGGSLKLSCAASGFTFNKYAMNWVRQAPGKGLEWVARIRSKYNNYATYYADSVKDRFTISRDDSKNTAYLQMNNLKTEDTAVYYCVRHGNFGNSYISYWAYWGQGTLVTVSSGGGGSGGGGSGGGGSQTVVTQEPSLTVSPGGTVTLTCGSSTGAVTSGNYPNWVQQKPGQAPRGLIGGTKFLAPGTPARFSGSLLGGKAALTLSGVQPEDEAEYYCVLWYSNRWVFGGGTKLTVL

SEQ ID NO: 332 - DNA, 1500 bp, Artificial Sequence
  MCSP-D5 HL x I2C HL
caggtgcagctggtccagtctggggctgaggtgaagaggcctggggcctcaatgaaggtctcctgcaaggcttctgggtacaccttcaccaactactatatacactgggtgcgacaggcccctggacaaggtcttgagtggatgggttggatcaaccctaacagtggtgccacaaactatgcacagaagttccagggcagagtcaccatgaccagggacacgtccacgagcacagtctacatggagctgagcagcctgagatctgaggacacggccgtgtattactgtgcgaaatcctgggtctcctggtttgcttcctggggtcaaggaaccttggtcaccgtctcctcaggtggtggtggttctggcggcggcggctccggtggtggtggttctgacatcgtgatgacccagtctccagactccctggctgtgtctctgggcgagagggccaccatcaactgcaagtccagccagagtgttttaaacagcaagaacaataggaactacttagcttggtaccagcagaaaccaggacagcctcctaagctgctcatttactgggcatctacccgggaatccggggtccctgaccgattcagtggcagcgggtctgggacagatttcactctcaccatcgattccctgcaggctgaagatagtgcaacttattactgtcagcaacattatagtactccattcacttttggccaggggaccagactggagatcaaatccggaggtggtggatccgaggtgcagctggtcgagtctggaggaggattggtgcagcctggagggtcattgaaactctcatgtgcagcctctggattcaccttcaataagtacgccatgaactgggtccgccaggctccaggaaagggtttggaatgggttgctcgcataagaagtaaatataataattatgcaacatattatgccgattcagtgaaagacaggttcaccatctccagagatgattcaaaaaacactgcctatctacaaatgaacaacttgaaaactgaggacactgccgtgtactactgtgtgagacatgggaacttcggtaatagctacatatcctactgggcttactggggccaagggactctggtcaccgtctcctcaggtggtggtggttctggcggcggcggctccggtggtggtggttctcagactgttgtgactcaggaaccttcactcaccgtatcacctggtggaacagtcacactcacttgtggctcctcgactggggctgttacatctggcaactacccaaactgggtccaacaaaaaccaggtcaggcaccccgtggtctaataggtgggactaagttcctcgcccccggtactcctgccagattctcaggctccctgcttggaggcaaggctgccctcaccctctcaggggtacagccagaggatgaggcagaatattactgtgttctatggtacagcaaccgctgggtgttcggtggaggaaccaaactgactgtccta

SEQ ID NO: 333 - protein, 500 aa, Artificial Sequence
  MCSP-F7 HL x I2C HL
QVQLVQSGAEVKRPGASMKVSCKASGYTFTNYYIHWVRQAPGQGLEWMGWINPNSGATNYAQKFQGRVTMTRDTSTSTVYMELSSLRSEDTAVYYCAKSWVSWFASWGQGTLVTVSSGGGGSGGGGSGGGGSDIVMTQSPDSLAVSLGERATINCKSSQSVLNSKNNRNYLAWYQQKPGQPPKLLIYWASTRESGVPDRFSGSGSGTDFTLTIDVLQPEDIATYYCQQHYSTPFTFGQGTRLEIKSGGGGSEVQLVESGGGLVQPGGSLKLSCAASGFTFNKYAMNWVRQAPGKGLEWVARIRSKYNNYATYYADSVKDRFTISRDDSKNTAYLQMNNLKTEDTAVYYCVRHGNFGNSYISYWAYWGQGTLVTVSSGGGGSGGGGSGGGGSQTVVTQEPSLTVSPGGTVTLTCGSSTGAVTSGNYPNWVQQKPGQAPRGLIGGTKFLAPGTPARFSGSLLGGKAALTLSGVQPEDEAEYYCVLWYSNRWVFGGGTKLTVL

SEQ ID NO: 334 - DNA, 1500 bp, Artificial Sequence
  MCSP-F7 HL x I2C HL
caggtgcagctggtccagtctggggctgaggtgaagaggcctggggcctcaatgaaggtctcctgcaaggcttctgggtacaccttcaccaactactatatacactgggtgcgacaggcccctggacaaggtcttgagtggatgggttggatcaaccctaacagtggtgccacaaactatgcacagaagttccagggcagagtcaccatgaccagggacacgtccacgagcacagtctacatggagctgagcagcctgagatctgaggacacggccgtgtattactgtgcgaaatcctgggtctcctggtttgcttcctggggtcaaggaaccttggtcaccgtctcctcaggtggtggtggttctggcggcggcggctccggtggtggtggttctgacatcgtgatgacccagtctccagactccctggctgtgtctctgggcgagagggccaccatcaactgcaagtccagccagagtgttttaaacagcaagaacaataggaactacttagcttggtaccagcagaaaccaggacagcctcctaagctgctcatttactgggcatctacccgggaatccggggtccctgaccgattcagtggcagcgggtctgggacagatttcactctcaccatcgatgtcctgcagcctgaagatattgcaacttattactgtcagcaacattatagtactccattcacttttggccaggggaccagactggagatcaaatccggaggtggtggatccgaggtgcagctggtcgagtctggaggaggattggtgcagcctggagggtcattgaaactctcatgtgcagcctctggattcaccttcaataagtacgccatgaactgggtccgccaggctccaggaaagggtttggaatgggttgctcgcataagaagtaaatataataattatgcaacatattatgccgattcagtgaaagacaggttcaccatctccagagatgattcaaaaaacactgcctatctacaaatgaacaacttgaaaactgaggacactgccgtgtactactgtgtgagacatgggaacttcggtaatagctacatatcctactgggcttactggggccaagggactctggtcaccgtctcctcaggtggtggtggttctggcggcggcggctccggtggtggtggttctcagactgttgtgactcaggaaccttcactcaccgtatcacctggtggaacagtcacactcacttgtggctcctcgactggggctgttacatctggcaactacccaaactgggtccaacaaaaaccaggtcaggcaccccgtggtctaataggtgggactaagttcctcgcccccggtactcctgccagattctcaggctccctgcttggaggcaaggctgccctcaccctctcaggggtacagccagaggatgaggcagaatattactgtgttctatggtacagcaaccgctgggtgttcggtggaggaaccaaactgactgtccta

SEQ ID NO: 335 - protein, 500 aa, Artificial Sequence
  MCSP-G5 HL x I2C HL
QVQLVQSGAEVKRPGASMKVSCKASGYTFTNYYIHWVRQAPGQGLEWMGWINPNSGATNYAQKFQGRVTMTRDTSTSTVYMELSSLRSEDTAVYYCAKSWVSWFASWGQGTLVTVSSGGGGSGGGGSGGGGSDIVMTQSPDSLAVSLGDRATINCKSSQSVLNSKNNRNYLAWYQQKPGQPPKLLIYWASTRESGVPDRFSGSGSGTDFTLTIDSLQPEDSATYYCQQHYSTPFTFGQGTRLEIKSGGGGSEVQLVESGGGLVQPGGSLKLSCAASGFTFNKYAMNWVRQAPGKGLEWVARIRSKYNNYATYYADSVKDRFTISRDDSKNTAYLQMNNLKTEDTAVYYCVRHGNFGNSYISYWAYWGQGTLVTVSSGGGGSGGGGSGGGGSQTVVTQEPSLTVSPGGTVTLTCGSSTGAVTSGNYPNWVQQKPGQAPRGLIGGTKFLAPGTPARFSGSLLGGKAALTLSGVQPEDEAEYYCVLWYSNRWVFGGGTKLTVL

SEQ ID NO: 336 - DNA, 1500 bp, Artificial Sequence
  MCSP-G5 HL x I2C HL
caggtgcagctggtccagtctggggctgaggtgaagaggcctggggcctcaatgaaggtctcctgcaaggcttctgggtacaccttcaccaactactatatacactgggtgcgacaggcccctggacaaggtcttgagtggatgggttggatcaaccctaacagtggtgccacaaactatgcacagaagttccagggcagagtcaccatgaccagggacacgtccacgagcacagtctacatggagctgagcagcctgagatctgaggacacggccgtgtattactgtgcgaaatcctgggtctcctggtttgcttcctggggtcaaggaaccttggtcaccgtctcctcaggtggtggtggttctggcggcggcggctccggtggtggtggttctgacatcgtgatgacccagtctccagactccctggctgtgtctctgggcgacagggccaccatcaactgcaagtccagccagagtgttttaaacagcaagaacaataggaactacttagcttggtaccagcagaaaccaggacagcctcctaagctgctcatttactgggcatctacccgggaatccggggtccctgaccgattcagtggcagcgggtctgggacagatttcactctcaccatcgattccctgcagcctgaggatagtgcaacttattactgtcagcaacattatagtactccattcacttttggccaggggaccagactggagatcaaatccggaggtggtggatccgaggtgcagctggtcgagtctggaggaggattggtgcagcctggagggtcattgaaactctcatgtgcagcctctggattcaccttcaataagtacgccatgaactgggtccgccaggctccaggaaagggtttggaatgggttgctcgcataagaagtaaatataataattatgcaacatattatgccgattcagtgaaagacaggttcaccatctccagagatgattcaaaaaacactgcctatctacaaatgaacaacttgaaaactgaggacactgccgtgtactactgtgtgagacatgggaacttcggtaatagctacatatcctactgggcttactggggccaagggactctggtcaccgtctcctcaggtggtggtggttctggcggcggcggctccggtggtggtggttctcagactgttgtgactcaggaaccttcactcaccgtatcacctggtggaacagtcacactcacttgtggctcctcgactggggctgttacatctggcaactacccaaactgggtccaacaaaaaccaggtcaggcaccccgtggtctaataggtgggactaagttcctcgcccccggtactcctgccagattctcaggctccctgcttggaggcaaggctgccctcaccctctcaggggtacagccagaggatgaggcagaatattactgtgttctatggtacagcaaccgctgggtgttcggtggaggaaccaaactgactgtccta

SEQ ID NO: 337 - protein, 500 aa, Artificial Sequence
  MCSP-F8 HL x I2C HL
QVQLVQSGAEVKRPGASMKVSCKASGYTFTNYYIHWVRQAPGQGLEWMGWINPNSGATNYAQKFQGRVTMTRDTSTSTVYMELSSLRSEDTAVYYCAKSWVSWFASWGQGTLVTVSSGGGGSGGGGSGGGGSDIVMTQSPDSLTVSLGERATINCKSSQSVLNSKNNRNYLAWYQQKPGQPPKLLIYWASTRESGVPDRFSGSGSGTDFTLTIDSLQAEDSAIYYCQQHYSTPFTFGQGTRLEIKSGGGGSEVQLVESGGGLVQPGGSLKLSCAASGFTFNKYAMNWVRQAPGKGLEWVARIRSKYNNYATYYADSVKDRFTISRDDSKNTAYLQMNNLKTEDTAVYYCVRHGNFGNSYISYWAYWGQGTLVTVSSGGGGSGGGGSGGGGSQTVVTQEPSLTVSPGGTVTLTCGSSTGAVTSGNYPNWVQQKPGQAPRGLIGGTKFLAPGTPARFSGSLLGGKAALTLSGVQPEDEAEYYCVLWYSNRWVFGGGTKLTVL

SEQ ID NO: 338 - DNA, 1500 bp, Artificial Sequence
  MCSP-F8 HL x I2C HL
caggtgcagctggtccagtctggggctgaggtgaagaggcctggggcctcaatgaaggtctcctgcaaggcttctgggtacaccttcaccaactactatatacactgggtgcgacaggcccctggacaaggtcttgagtggatgggttggatcaaccctaacagtggtgccacaaactatgcacagaagttccagggcagagtcaccatgaccagggacacgtccacgagcacagtctacatggagctgagcagcctgagatctgaggacacggccgtgtattactgtgcgaaatcctgggtctcctggtttgcttcctggggtcaaggaaccttggtcaccgtctcctcaggtggtggtggttctggcggcggcggctccggtggtggtggttctgacatcgtgatgacccagtctccagactccctgactgtgtctctgggcgagagggccaccatcaactgcaagtccagccagagtgttttaaacagcaagaacaataggaactacttagcttggtaccagcagaaaccaggacagcctcctaagctgctcatttactgggcatctacccgggaatccggggtccctgaccgattcagtggcagcgggtctgggacagatttcactctcaccatcgattccctgcaggctgaagatagtgcaatttattactgtcagcaacattatagtactccattcacttttggccaggggaccagactggagatcaaatccggaggtggtggatccgaggtgcagctggtcgagtctggaggaggattggtgcagcctggagggtcattgaaactctcatgtgcagcctctggattcaccttcaataagtacgccatgaactgggtccgccaggctccaggaaagggtttggaatgggttgctcgcataagaagtaaatataataattatgcaacatattatgccgattcagtgaaagacaggttcaccatctccagagatgattcaaaaaacactgcctatctacaaatgaacaacttgaaaactgaggacactgccgtgtactactgtgtgagacatgggaacttcggtaatagctacatatcctactgggcttactggggccaagggactctggtcaccgtctcctcaggtggtggtggttctggcggcggcggctccggtggtggtggttctcagactgttgtgactcaggaaccttcactcaccgtatcacctggtggaacagtcacactcacttgtggctcctcgactggggctgttacatctggcaactacccaaactgggtccaacaaaaaccaggtcaggcaccccgtggtctaataggtgggactaagttcctcgcccccggtactcctgccagattctcaggctccctgcttggaggcaaggctgccctcaccctctcaggggtacagccagaggatgaggcagaatattactgtgttctatggtacagcaaccgctgggtgttcggtggaggaaccaaactgactgtccta

SEQ ID NO: 339 - protein, 500 aa, Artificial Sequence
  MCSP-G10 HL x I2C HL
QVQLVQSGAEVKRPGASMKVSCKASGYTFTNYYIHWVRQAPGQGLEWMGWINPNSGATNYAQKFQGRVTMTRDTSTSTVYMELSSLRSEDTAVYYCAKSWVSWFASWGQGTLVTVSSGGGGSGGGGSGGGGSDIVMTQSPDSLAVSLGERATINCKSSQSVLSSSNNKNYLNWYQQKPGQPPKLLIYWASTRESGVPDRFSGSGSGTDFTLTISSLQAEDVAVYYCQQHFNTPFAFGQGTKLEIKSGGGGSEVQLVESGGGLVQPGGSLKLSCAASGFTFNKYAMNWVRQAPGKGLEWVARIRSKYNNYATYYADSVKDRFTISRDDSKNTAYLQMNNLKTEDTAVYYCVRHGNFGNSYISYWAYWGQGTLVTVSSGGGGSGGGGSGGGGSQTVVTQEPSLTVSPGGTVTLTCGSSTGAVTSGNYPNWVQQKPGQAPRGLIGGTKFLAPGTPARFSGSLLGGKAALTLSGVQPEDEAEYYCVLWYSNRWVFGGGTKLTVL

SEQ ID NO: 340 - DNA, 1500 bp, Artificial Sequence
  MCSP-G10 HL x I2C HL
caggtgcagctggtccagtctggggctgaggtgaagaggcctggggcctcaatgaaggtctcctgcaaggcttctgggtacaccttcaccaactactatatacactgggtgcgacaggcccctggacaaggtcttgagtggatgggttggatcaaccctaacagtggtgccacaaactatgcacagaagttccagggcagagtcaccatgaccagggacacgtccacgagcacagtctacatggagctgagcagcctgagatctgaggacacggccgtgtattactgtgcgaaatcctgggtctcctggtttgcttcctggggtcaaggaaccttggtcaccgtctcctcaggtggtggtggttctggcggcggcggctccggtggtggtggttctgacatcgtgatgacacagtctccagactccctggctgtgtctctgggcgagagggccaccatcaactgcaagtccagccagagtgtcttatccagctccaacaataagaactacttaaattggtaccagcagaaaccaggacagcctcctaagttgctcatttactgggcatctacccgggaatccggggtccctgaccgattcagtggcagcgggtctgggacagatttcactctcaccatcagcagcctgcaggctgaagatgtggcggtttattactgtcaacaacattttaatactccgttcgcttttggccaggggaccaagctggagatcaaatccggaggtggtggatccgaggtgcagctggtcgagtctggaggaggattggtgcagcctggagggtcattgaaactctcatgtgcagcctctggattcaccttcaataagtacgccatgaactgggtccgccaggctccaggaaagggtttggaatgggttgctcgcataagaagtaaatataataattatgcaacatattatgccgattcagtgaaagacaggttcaccatctccagagatgattcaaaaaacactgcctatctacaaatgaacaacttgaaaactgaggacactgccgtgtactactgtgtgagacatgggaacttcggtaatagctacatatcctactgggcttactggggccaagggactctggtcaccgtctcctcaggtggtggtggttctggcggcggcggctccggtggtggtggttctcagactgttgtgactcaggaaccttcactcaccgtatcacctggtggaacagtcacactcacttgtggctcctcgactggggctgttacatctggcaactacccaaactgggtccaacaaaaaccaggtcaggcaccccgtggtctaataggtgggactaagttcctcgcccccggtactcctgccagattctcaggctccctgcttggaggcaaggctgccctcaccctctcaggggtacagccagaggatgaggcagaatattactgtgttctatggtacagcaaccgctgggtgttcggtggaggaaccaaactgactgtccta

SEQ ID NO: 341 - protein, 8 aa, Homo sapiens
QDGNEEMG

SEQ ID NO: 342 - protein, 8 aa, Saimiri sciureus
QDGNEEIG

SEQ ID NO: 343 - DNA, 20 bp, Artificial Sequence
  Thioate-modified CpG-Oligonucleotide
tccatgacgttcctgatgct

SEQ ID NO: 344 - DNA, 28 bp, Artificial Sequence
  MVH1
gcaggtgcagctcgaggagtcaggacct

SEQ ID NO: 345 - DNA, 27 bp, Artificial Sequence
  MVH2
gaggtccagctcgagcagtctggacct

SEQ ID NO: 346 - DNA, 27 bp, Artificial Sequence
  MVH3
caggtccaactcgagcagcctggggct

SEQ ID NO: 347 - DNA, 27 bp, Artificial Sequence
  MVH4
gaggttcagctcgagcagtctggggca

SEQ ID NO: 348 - DNA, 28 bp, Artificial Sequence
  MVH5
gaaggtgaagctcgaggagtctggagga

SEQ ID NO: 349 - DNA, 27 bp, Artificial Sequence
  MVH6
gaggtgaagcttctcgagtctggaggt

SEQ ID NO: 350 - DNA, 27 bp, Artificial Sequence
  MVH7
gaagtgaagctcgaggagtctggggga

SEQ ID NO: 351 - DNA, 27 bp, Artificial Sequence
  MVH8
gaggttcagctcgagcagtctggagct

SEQ ID NO: 352 - DNA, 34 bp, Artificial Sequence
  MuVHBstEII
tgaggagacggtgaccgtggtcccttggccccag

SEQ ID NO: 353 - DNA, 32 bp, Artificial Sequence
  MUVK1
ccagttccgagctcgttgtgactcaggaatct

SEQ ID NO: 354 - DNA, 32 bp, Artificial Sequence
  MUVK2
ccagttccgagctcgtgttgacgcagccgccc

SEQ ID NO: 355 - DNA, 32 bp, Artificial Sequence
  MUVK3
ccagttccgagctcgtgctcacccagtctcca

SEQ ID NO: 356 - DNA, 32 bp, Artificial Sequence
  MUVK4
ccagttccgagctccagatgacccagtctcca

SEQ ID NO: 357 - DNA, 32 bp, Artificial Sequence
  MUVK5
ccagatgtgagctcgtgatgacccagactcca

SEQ ID NO: 358 - DNA, 32 bp, Artificial Sequence
  MUVK6
ccagatgtgagctcgtcatgacccagtctcca

SEQ ID NO: 359 - DNA, 32 bp, Artificial Sequence
  MUVK7
ccagttccgagctcgtgatgacacagtctcca

SEQ ID NO: 360 - DNA, 39 bp, Artificial Sequence
  MuVkHindIII/BsiW1
tggtgcactagtcgtacgtttgatctcaagcttggtccc

SEQ ID NO: 361 - DNA, 22 bp, Artificial Sequence
  forward primer
gatctggtctacaccatcgagc

SEQ ID NO: 362 - DNA, 24 bp, Artificial Sequence
  reverse primer
ggagctgctgctggctcagtgagg

SEQ ID NO: 363 - DNA, 23 bp, Artificial Sequence
  forward primer
ttccagctgagcatgtctgatgg

SEQ ID NO: 364 - DNA, 21 bp, Artificial Sequence
  reverse primer
cgatcagcatctgggcccagg

SEQ ID NO: 365 - DNA, 25 bp, Artificial Sequence
  forward primer
gtggagcagttcactcagcaggacc

SEQ ID NO: 366 - DNA, 22 bp, Artificial Sequence
  reverse primer
gccttcacacccagtactggcc

SEQ ID NO: 367 - DNA, 59 bp, Artificial Sequence
  forward primer
tcccgtacgagatctggatcccaattggatggcggactcgtgctgttctcacacagagg

SEQ ID NO: 368 - DNA, 45 bp, Artificial Sequence
  reverse primer
agtgggtcgactcacacccagtactggccattcttaagggcaggg

SEQ ID NO: 369 - DNA, 64 bp, Artificial Sequence
  forward primer
gaggaattcaccatgccgctgctgctactgctgcccctgctgtgggcaggggccctggctatgg

SEQ ID NO: 370 - DNA, 26 bp, Artificial Sequence
  reverse primer
gatttgtaactgtatttggtacttcc

SEQ ID NO: 371 - DNA, 21 bp, Artificial Sequence
  forward primer
attccgcctccttggggatcc

SEQ ID NO: 372 - DNA, 25 bp, Artificial Sequence
  reverse primer
gcataggagacattgagctggatgg

SEQ ID NO: 373 - DNA, 21 bp, Artificial Sequence
  forward primer
gcaccaacctgacctgtcagg

SEQ ID NO: 374 - DNA, 39 bp, Artificial Sequence
  reverse primer
agtgggtcgactcactgggtcctgacctctgagtattcg

SEQ ID NO: 375 - DNA, 21 bp, Artificial Sequence
  forward primer
cactgtggcccaggttcgagg

SEQ ID NO: 376 - DNA, 25 bp, Artificial Sequence
  reverse primer
gacataccacacaaattcaatacgg

SEQ ID NO: 377 - DNA, 23 bp, Artificial Sequence
  forward primer
gctctgctcgcgccgagatgtgg

SEQ ID NO: 378 - DNA, 21 bp, Artificial Sequence
  reverse primer
acgctggacaccacctccagg

SEQ ID NO: 379 - DNA, 22 bp, Artificial Sequence
  forward primer
ggttctactgagtgggcagagg

SEQ ID NO: 380 - DNA, 22 bp, Artificial Sequence
  reverse primer
acttgttgtggctgcttggagc

SEQ ID NO: 381 - DNA, 22 bp, Artificial Sequence
  forward primer
gggtgaagtcctatccagatgg

SEQ ID NO: 382 - DNA, 22 bp, Artificial Sequence
  reverse primer
gtgctctgcctgaagcaattcc

SEQ ID NO: 383 - DNA, 21 bp, Artificial Sequence
  forward primer
ctcggcttcctcttcgggtgg

SEQ ID NO: 384 - DNA, 26 bp, Artificial Sequence
  reverse primer
gcatattcatttgctgggtaacctgg

SEQ ID NO: 385 - DNA, 2253 bp, Artificial Sequence
  macaque PSMA (Cynomolgus)
atgtggaatctcctgcacgaaaccgactcggctgtggccaccgcgcgccgcccgcgctggctgtgcgctggggcactggtgctggcgggtggcttctttctcctcggcttcctcttcggatggtttataaaatcctccagtgaagctactaacattactccaaagcataatatgaaagcatttttggatgaactgaaagctgagaacatcaagaagttcttacataattttacacagataccacatttagcaggaacagaacaaaactttcaacttgcaaagcaaattcaatcccagtggaaagaatttggcctggattctgttgagctaactcattatgatgtcctgttgtcctacccaaataagactcatcccaactacatctcaataattaatgaagatggaaatgagattttcaacacatcattatttgaaccacctcctgcaggatatgaaaatgtttcggatattgtaccacctttcagtgctttctctcctcaaggaatgccagagggcgatctagtgtatgttaactatgcacgaactgaagacttctttaaattggaacgggacatgaaaatcaattgctctgggaaaattgtaattgccagatatgggaaagttttcagaggaaataaggttaaaaatgcccagctggcaggggccacaggagtcattctctactcagaccctgctgactactttgctcctggggtaaagtcttatccagatggttggaatcttcctggaggtggtgtccagcgtggaaatatcctaaatctgaatggtgcaggagaccctctcacaccaggttacccagcaaatgaatatgcttataggcgtggaatggcagaggctgttggtcttccaagtattcccgttcatccaattgggtactatgatgcacagaagctcctagaaaaaatgggtggctcagcatcaccagatagcagctggagaggaagtctcaaagtgccctacaatgttggacctggctttactggaaacttttctacacaaaaagtcaagatgcacatccactctaccagtgaagtgacaagaatttacaatgtgataggtactctcagaggagcagtggaaccagacagatacgtcattctgggaggtcaccgggactcatgggtgtttggtggtattgaccctcagagtggagcagctgttgttcatgaaattgtgaggagctttggaacgctgaaaaaggaagggtggagacctagaagaacaattttgtttgcaagctgggatgcagaagaatttggtcttcttggttctactgaatgggcagaggagaattcaagactccttcaagagcgtggcgtggcttatattaatgctgattcgtctatagagggaaactacactctgagagttgattgtacaccactgatgtacagcttggtatacaacctaacaaaagagctggaaagccctgatgaaggctttgaaggcaaatctctttatgaaagttggactaaaaaaagtccttcccccgagttcagtggcatgcccaggataagcaaattgggatctggaaatgattttgaggtgttcttccaacgacttggaattgcctcaggcagagcacggtatactaaaaattgggaaacaaacaaattcagcagctatccactgtatcacagtgtctatgagacatatgagttggtggaaaagttttatgatccaatgtttaaatatcacctcactgtggcccaggttcgaggagggatggtgtttgaactagccaattccgtagtgctcccttttgattgtcgagattatgctgtagttttaagaaagtatgctgacaaaatctacaatatttctatgaaacatccacaggaaatgaagacatacagtgtatcatttgattcacttttttctgcagtaaagaattttacagaaattgcttccaagttcagcgagagactccgggactttgacaaaagcaacccaatattattaagaatgatgaatgatcaactcatgtttctggaaagagcatttattgatccattagggttaccagacagacctttttataggcatgtcatctatgctccaagcagccacaacaagtatgcaggggagtcattcccaggaatttatgatgctctgtttgatatcgaaagcaaagtggacccttcccaggcctggggagaagtgaagagacagatttctgttgcaaccttcacagtgcaagcagctgcagagactttgagtgaagtggcctaa

SEQ ID NO: 386 - protein, 750 aa, Artificial Sequence
  macaque PSMA(Cynomolgus)
MWNLLHETDSAVATARRPRWLCAGALVLAGGFFLLGFLFGWFIKSSSEATNITPKHNMKAFLDELKAENIKKFLHNFTQIPHLAGTEQNFQLAKQIQSQWKEFGLDSVELTHYDVLLSYPNKTHPNYISIINEDGNEIFNTSLFEPPPAGYENVSDIVPPFSAFSPQGMPEGDLVYVNYARTEDFFKLERDMKINCSGKIVIARYGKVFRGNKVKNAQLAGATGVILYSDPADYFAPGVKSYPDGWNLPGGGVQRGNILNLNGAGDPLTPGYPANEYAYRRGMAEAVGLPSIPVHPIGYYDAQKLLEKMGGSASPDSSWRGSLKVPYNVGPGFTGNFSTQKVKMHIHSTSEVTRIYNVIGTLRGAVEPDRYVILGGHRDSWVFGGIDPQSGAAVVHEIVRSFGTLKKEGWRPRRTILFASWDAEEFGLLGSTEWAEENSRLLQERGVAYINADSSIEGNYTLRVDCTPLMYSLVYNLTKELESPDEGFEGKSLYESWTKKSPSPEFSGMPRISKLGSGNDFEVFFQRLGIASGRARYTKNWETNKFSSYPLYHSVYETYELVEKFYDPMFKYHLTVAQVRGGMVFELANSVVLPFDCRDYAVVLRKYADKIYNISMKHPQEMKTYSVSFDSLFSAVKNFTEIASKFSERLRDFDKSNPILLRMMNDQLMFLERAFIDPLGLPDRPFYRHVIYAPSSHNKYAGESFPGIYDALFDIESKVDPSQAWGEVKRQISVATFTVQAAAETLSEVA

SEQ ID NO: 387 - protein, 107 aa, Artificial Sequence
  PSMA-3 L
DIQMTQSPKFMSTSVGDRVSVTCKASQNVDTNVAWYQQKPGQSPKALIYSASYRYSDVPDRFTGSESGTDFTLTISNVQSEDLAEYFCQQYDSYPYTFGGGTKLEIK

SEQ ID NO: 388 - DNA, 321 bp, Artificial Sequence
  PSMA-3 L
gacatccagatgacccagtcccccaagttcatgtccacctccgtgggcgacagagtgtccgtgacctgcaaggcctcccagaacgtggacaccaacgtggcctggtatcagcagaagcccggccagtcccctaaggccctgatctactccgcctcctaccggtactctgacgtgcctgaccggttcaccggctccgagtccggcaccgacttcaccctgaccatctccaacgtgcagtctgaggacctggccgagtacttctgccagcagtacgactcctacccttacaccttcggcggagggaccaagctggaaatcaag

SEQ ID NO: 389 - protein, 11 aa, Artificial Sequence
  PSMA-3 LCDR1
KASQNVDTNVA

SEQ ID NO: 390 - protein, 7 aa, Artificial Sequence
  PSMA-3 LCDR2
SASYRYS

SEQ ID NO: 391 - protein, 9 aa, Artificial Sequence
  PSMA-3 LCDR3
QQYDSYPYT

SEQ ID NO: 392 - protein, 121 aa, Artificial Sequence
  PSMA-3 H
DVKLVESGGGLVKPGESLKLSCIASGFTFSDYYMYWVRQTPEKRLEWVAIISDGGYYTYYSDIIKGRFTISRDNAKNNLYLQMSSLKSEDTAMYYCTRGFPLLRHGAMDYWGLGTSVTVSS

SEQ ID NO: 393 - DNA, 363 bp, Artificial Sequence
  PSMA-3 H
gacgtgaaactggtggagtctggcggcggactggtgaagcctggcgagtccctgaagctgtcctgtatcgcctccggcttcaccttctccgactactacatgtactgggtgcgccagacccctgagaagcggctggaatgggtggccatcatctccgacggcggctactacacctactactccgacatcatcaagggccggttcaccatctcccgggacaacgccaagaacaacctgtacctgcagatgtcctccctgaagtccgaggacaccgccatgtactactgcacccggggcttccctctgctgagacacggcgccatggattactggggcctgggcacctctgtgaccgtgtcctct

SEQ ID NO: 394 - protein, 5 aa, Artificial Sequence
  PSMA-3 HCDR1
DYYMY

SEQ ID NO: 395 - protein, 17 aa, Artificial Sequence
  PSMA-3 HCDR2
IISDGGYYTYYSDIIKG

SEQ ID NO: 396 - protein, 12 aa, Artificial Sequence
  PSMA-3 HCDR3
GFPLLRHGAMDY

SEQ ID NO: 397 - protein, 243 aa, Artificial Sequence
  PSMA-3 HL
DVKLVESGGGLVKPGESLKLSCIASGFTFSDYYMYWVRQTPEKRLEWVAIISDGGYYTYYSDIIKGRFTISRDNAKNNLYLQMSSLKSEDTAMYYCTRGFPLLRHGAMDYWGLGTSVTVSSGGGGSGGGGSGGGGSDIQMTQSPKFMSTSVGDRVSVTCKASQNVDTNVAWYQQKPGQSPKALIYSASYRYSDVPDRFTGSESGTDFTLTISNVQSEDLAEYFCQQYDSYPYTFGGGTKLEIK

SEQ ID NO: 398 - DNA, 729 bp, Artificial Sequence
  PSMA-3 HL
gacgtgaaactggtggagtctggcggcggactggtgaagcctggcgagtccctgaagctgtcctgtatcgcctccggcttcaccttctccgactactacatgtactgggtgcgccagacccctgagaagcggctggaatgggtggccatcatctccgacggcggctactacacctactactccgacatcatcaagggccggttcaccatctcccgggacaacgccaagaacaacctgtacctgcagatgtcctccctgaagtccgaggacaccgccatgtactactgcacccggggcttccctctgctgagacacggcgccatggattactggggcctgggcacctctgtgaccgtgtcctctggcggagggggcagtggaggcggaggaagtggagggggcggatccgacatccagatgacccagtcccccaagttcatgtccacctccgtgggcgacagagtgtccgtgacctgcaaggcctcccagaacgtggacaccaacgtggcctggtatcagcagaagcccggccagtcccctaaggccctgatctactccgcctcctaccggtactctgacgtgcctgaccggttcaccggctccgagtccggcaccgacttcaccctgaccatctccaacgtgcagtctgaggacctggccgagtacttctgccagcagtacgactcctacccttacaccttcggcggagggaccaagctggaaatcaag

SEQ ID NO: 399 - protein, 498 aa, Artificial Sequence
  PSMA-3 HL x I2C HL
DVKLVESGGGLVKPGESLKLSCIASGFTFSDYYMYWVRQTPEKRLEWVAIISDGGYYTYYSDIIKGRFTISRDNAKNNLYLQMSSLKSEDTAMYYCTRGFPLLRHGAMDYWGLGTSVTVSSGGGGSGGGGSGGGGSDIQMTQSPKFMSTSVGDRVSVTCKASQNVDTNVAWYQQKPGQSPKALIYSASYRYSDVPDRFTGSESGTDFTLTISNVQSEDLAEYFCQQYDSYPYTFGGGTKLEIKSGGGGSEVQLVESGGGLVQPGGSLKLSCAASGFTFNKYAMNWVRQAPGKGLEWVARIRSKYNNYATYYADSVKDRFTISRDDSKNTAYLQMNNLKTEDTAVYYCVRHGNFGNSYISYWAYWGQGTLVTVSSGGGGSGGGGSGGGGSQTVVTQEPSLTVSPGGTVTLTCGSSTGAVTSGNYPNWVQQKPGQAPRGLIGGTKFLAPGTPARFSGSLLGGKAALTLSGVQPEDEAEYYCVLWYSNRWVFGGGTKLTVL

SEQ ID NO: 400 - DNA, 1494 bp, Artificial Sequence
  PSMA-3 HL x I2C HL
gacgtgaaactggtggagtctggcggcggactggtgaagcctggcgagtccctgaagctgtcctgtatcgcctccggcttcaccttctccgactactacatgtactgggtgcgccagacccctgagaagcggctggaatgggtggccatcatctccgacggcggctactacacctactactccgacatcatcaagggccggttcaccatctcccgggacaacgccaagaacaacctgtacctgcagatgtcctccctgaagtccgaggacaccgccatgtactactgcacccggggcttccctctgctgagacacggcgccatggattactggggcctgggcacctctgtgaccgtgtcctctggcggagggggcagtggaggcggaggaagtggagggggcggatccgacatccagatgacccagtcccccaagttcatgtccacctccgtgggcgacagagtgtccgtgacctgcaaggcctcccagaacgtggacaccaacgtggcctggtatcagcagaagcccggccagtcccctaaggccctgatctactccgcctcctaccggtactctgacgtgcctgaccggttcaccggctccgagtccggcaccgacttcaccctgaccatctccaacgtgcagtctgaggacctggccgagtacttctgccagcagtacgactcctacccttacaccttcggcggagggaccaagctggaaatcaagtccggaggtggtggatccgaggtgcagctggtcgagtctggaggaggattggtgcagcctggagggtcattgaaactctcatgtgcagcctctggattcaccttcaataagtacgccatgaactgggtccgccaggctccaggaaagggtttggaatgggttgctcgcataagaagtaaatataataattatgcaacatattatgccgattcagtgaaagacaggttcaccatctccagagatgattcaaaaaacactgcctatctacaaatgaacaacttgaaaactgaggacactgccgtgtactactgtgtgagacatgggaacttcggtaatagctacatatcctactgggcttactggggccaagggactctggtcaccgtctcctcaggtggtggtggttctggcggcggcggctccggtggtggtggttctcagactgttgtgactcaggaaccttcactcaccgtatcacctggtggaacagtcacactcacttgtggctcctcgactggggctgttacatctggcaactacccaaactgggtccaacaaaaaccaggtcaggcaccccgtggtctaataggtgggactaagttcctcgcccccggtactcctgccagattctcaggctccctgcttggaggcaaggctgccctcaccctctcaggggtacagccagaggatgaggcagaatattactgtgttctatggtacagcaaccgctgggtgttcggtggaggaaccaaactgactgtccta

SEQ ID NO: 401 - protein, 111 aa, Artificial Sequence
  PSMA-4 L
DIELTQSPLSLPVILGDQASISCRSSQSLVHSNGNTYLHWFLQKPGQSPKLLIYTVSNRFSGVPDRFSGSGSGTDFTLKISRVEAEDLGVYFCSQSTHVPTFGGGTKLEIK

SEQ ID NO: 402 - DNA, 333 bp, Artificial Sequence
  PSMA-4 L
gacatcgagctgacccagtcccccctgtccctgcctgtgatcctgggcgaccaggcctccatctcctgccggtcctcccagtccctggtgcactccaacggcaatacctacctgcactggtttctgcagaagcctggccagtcccctaagctgctgatctacaccgtgtccaaccggttctccggcgtgcctgacaggttctctggctccggctccggcaccgacttcaccctgaagatctcccgggtggaggccgaagatctgggcgtgtacttttgctcccagtccacccacgtgcctaccttcggcggagggaccaagctggaaatcaag

SEQ ID NO: 403 - protein, 16 aa, Artificial Sequence
  PSMA-4 LCDR1
RSSQSLVHSNGNTYLH

SEQ ID NO: 404 - protein, 7 aa, Artificial Sequence
  PSMA-4 LCDR2
TVSNRFS

SEQ ID NO: 405 - protein, 8 aa, Artificial Sequence
  PSMA-4 LCDR3
SQSTHVPT

SEQ ID NO: 406 - protein, 120 aa, Artificial Sequence
  PSMA-4 H
QVQLQQSGAELVEPGASVKLSCKASGYTFTYFDINWLRQRPEQGLEWIGGISPGDGNTNYNENFKGKATLTIDKSSTTAYIQLSRLTSEDSAVYFCARDGNFPYYAMDSWGQGTSVTVSS

SEQ ID NO: 407 - DNA, 360 bp, Artificial Sequence
  PSMA-4 H
caggtgcagctgcagcagtctggcgccgaactggtggagcctggcgcctccgtgaagctgtcctgcaaggcctccggctacaccttcacctacttcgacatcaactggctgcggcagaggcctgagcagggcctggaatggatcggcggcatctcccctggcgacggcaacaccaactacaacgagaacttcaagggcaaggccaccctgaccatcgacaagtcctccaccaccgcctacatccagctgtcccggctgacctctgaggactccgccgtgtacttctgcgccagggacggcaacttcccttactacgccatggactcttggggccagggcacctccgtgaccgtgtctagt

SEQ ID NO: 408 - protein, 5 aa, Artificial Sequence
  PSMA-4 HCDR1
YFDIN

SEQ ID NO: 409 - protein, 17 aa, Artificial Sequence
  PSMA-4 HCDR2
GISPGDGNTNYNENFKG

SEQ ID NO: 410 - protein, 11 aa, Artificial Sequence
  PSMA-4 HCDR3
DGNFPYYAMDS

SEQ ID NO: 411 - protein, 246 aa, Artificial Sequence
  PSMA-4 HL
QVQLQQSGAELVEPGASVKLSCKASGYTFTYFDINWLRQRPEQGLEWIGGISPGDGNTNYNENFKGKATLTIDKSSTTAYIQLSRLTSEDSAVYFCARDGNFPYYAMDSWGQGTSVTVSSGGGGSGGGGSGGGGSDIELTQSPLSLPVILGDQASISCRSSQSLVHSNGNTYLHWFLQKPGQSPKLLIYTVSNRFSGVPDRFSGSGSGTDFTLKISRVEAEDLGVYFCSQSTHVPTFGGGTKLEIK

SEQ ID NO: 412 - DNA, 738 bp, Artificial Sequence
  PSMA-4 HL
caggtgcagctgcagcagtctggcgccgaactggtggagcctggcgcctccgtgaagctgtcctgcaaggcctccggctacaccttcacctacttcgacatcaactggctgcggcagaggcctgagcagggcctggaatggatcggcggcatctcccctggcgacggcaacaccaactacaacgagaacttcaagggcaaggccaccctgaccatcgacaagtcctccaccaccgcctacatccagctgtcccggctgacctctgaggactccgccgtgtacttctgcgccagggacggcaacttcccttactacgccatggactcttggggccagggcacctccgtgaccgtgtctagtggcggcggaggatctggcggagggggatctgggggcggaggaagcgacatcgagctgacccagtcccccctgtccctgcctgtgatcctgggcgaccaggcctccatctcctgccggtcctcccagtccctggtgcactccaacggcaatacctacctgcactggtttctgcagaagcctggccagtcccctaagctgctgatctacaccgtgtccaaccggttctccggcgtgcctgacaggttctctggctccggctccggcaccgacttcaccctgaagatctcccgggtggaggccgaagatctgggcgtgtacttttgctcccagtccacccacgtgcctaccttcggcggagggaccaagctggaaatcaag

SEQ ID NO: 413 - protein, 501 aa, Artificial Sequence
  PSMA-4HL x I2C HL
QVQLQQSGAELVEPGASVKLSCKASGYTFTYFDINWLRQRPEQGLEWIGGISPGDGNTNYNENFKGKATLTIDKSSTTAYIQLSRLTSEDSAVYFCARDGNFPYYAMDSWGQGTSVTVSSGGGGSGGGGSGGGGSDIELTQSPLSLPVILGDQASISCRSSQSLVHSNGNTYLHWFLQKPGQSPKLLIYTVSNRFSGVPDRFSGSGSGTDFTLKISRVEAEDLGVYFCSQSTHVPTFGGGTKLEIKSGGGGSEVQLVESGGGLVQPGGSLKLSCAASGFTFNKYAMNWVRQAPGKGLEWVARIRSKYNNYATYYADSVKDRFTISRDDSKNTAYLQMNNLKTEDTAVYYCVRHGNFGNSYISYWAYWGQGTLVTVSSGGGGSGGGGSGGGGSQTVVTQEPSLTVSPGGTVTLTCGSSTGAVTSGNYPNWVQQKPGQAPRGLIGGTKFLAPGTPARFSGSLLGGKAALTLSGVQPEDEAEYYCVLWYSNRWVFGGGTKLTVL

SEQ ID NO: 414 - DNA, 1503 bp, Artificial Sequence
  PSMA-4HL x I2C HL
caggtgcagctgcagcagtctggcgccgaactggtggagcctggcgcctccgtgaagctgtcctgcaaggcctccggctacaccttcacctacttcgacatcaactggctgcggcagaggcctgagcagggcctggaatggatcggcggcatctcccctggcgacggcaacaccaactacaacgagaacttcaagggcaaggccaccctgaccatcgacaagtcctccaccaccgcctacatccagctgtcccggctgacctctgaggactccgccgtgtacttctgcgccagggacggcaacttcccttactacgccatggactcttggggccagggcacctccgtgaccgtgtctagtggcggcggaggatctggcggagggggatctgggggcggaggaagcgacatcgagctgacccagtcccccctgtccctgcctgtgatcctgggcgaccaggcctccatctcctgccggtcctcccagtccctggtgcactccaacggcaatacctacctgcactggtttctgcagaagcctggccagtcccctaagctgctgatctacaccgtgtccaaccggttctccggcgtgcctgacaggttctctggctccggctccggcaccgacttcaccctgaagatctcccgggtggaggccgaagatctgggcgtgtacttttgctcccagtccacccacgtgcctaccttcggcggagggaccaagctggaaatcaagtccggaggtggtggatccgaggtgcagctggtcgagtctggaggaggattggtgcagcctggagggtcattgaaactctcatgtgcagcctctggattcaccttcaataagtacgccatgaactgggtccgccaggctccaggaaagggtttggaatgggttgctcgcataagaagtaaatataataattatgcaacatattatgccgattcagtgaaagacaggttcaccatctccagagatgattcaaaaaacactgcctatctacaaatgaacaacttgaaaactgaggacactgccgtgtactactgtgtgagacatgggaacttcggtaatagctacatatcctactgggcttactggggccaagggactctggtcaccgtctcctcaggtggtggtggttctggcggcggcggctccggtggtggtggttctcagactgttgtgactcaggaaccttcactcaccgtatcacctggtggaacagtcacactcacttgtggctcctcgactggggctgttacatctggcaactacccaaactgggtccaacaaaaaccaggtcaggcaccccgtggtctaataggtgggactaagttcctcgcccccggtactcctgccagattctcaggctccctgcttggaggcaaggctgccctcaccctctcaggggtacagccagaggatgaggcagaatattactgtgttctatggtacagcaaccgctgggtgttcggtggaggaaccaaactgactgtccta

SEQ ID NO: 415 - protein, 106 aa, Artificial Sequence
  PSMA-6 L
DIKMTQSPSSMYASLGERVTITCKASQDIYSYLIWFQQKPGKSPKTLIYRANRLVDGVPSRFSGSGSGQDYSLTISSLEYEDMGIYYCLQYDEFATFGSGTKLEMK

SEQ ID NO: 416 - DNA, 318 bp, Artificial Sequence
  PSMA-6 L
gacatcaagatgacccagtccccctcctccatgtacgcctccctgggcgagagagtgaccatcacctgcaaggcctcccaggacatctactcctacctgatctggttccagcagaagcctggcaagtcccctaagaccctgatctaccgggccaacagactggtggacggcgtgccttccaggttctccggctccggctctggccaggactactccctgaccatctcctccctggaatacgaggacatgggcatctactactgcctgcagtacgacgagttcgccaccttcggctccggcaccaagctggaaatgaag

SEQ ID NO: 417 - protein, 11 aa, Artificial Sequence
  PSMA-6 LCDR1
KASQDIYSYLI

SEQ ID NO: 418 - protein, 7 aa, Artificial Sequence
  PSMA-6 LCDR2
RANRLVD

SEQ ID NO: 419 - protein, 8 aa, Artificial Sequence
  PSMA-6 LCDR3
LQYDEFAT

SEQ ID NO: 420 - protein, 122 aa, Artificial Sequence
  PSMA-6 H
DVHLQESGPGLVKPSQSLSLTCTVTGYSITSDYAWNWIRQFPGNKLEWMGYISFSGSTSYNPSLKSRISVTRDTSKNQFFLQLNSVTTEDTATYYCARWNYYGSSHVWFAYWGQGTLVTVSS

SEQ ID NO: 421 - DNA, 366 bp, Artificial Sequence
  PSMA-6 H
gacgtgcacctgcaggaatctggccctggcctggtgaagccttcccagtccctgtccctgacctgcaccgtgaccggctactccatcacctccgactacgcctggaactggatccggcagttccctggcaataagctggaatggatgggctacatctccttctccggcagcacctcctacaacccttccctgaagtcccggatctccgtgacccgggacacctccaagaaccagttcttcctgcagctgaactccgtgaccaccgaggacaccgccacctactactgcgcccggtggaactactacggctcctcccacgtgtggttcgcttactggggccagggcaccctggtgaccgtgtcctcc

SEQ ID NO: 422 - protein, 6 aa, Artificial Sequence
  PSMA-6 HCDR1
SDYAWN

SEQ ID NO: 423 - protein, 16 aa, Artificial Sequence
  PSMA-6 HCDR2
YISFSGSTSYNPSLKS

SEQ ID NO: 424 - protein, 13 aa, Artificial Sequence
  PSMA-6 HCDR3
WNYYGSSHVWFAY

SEQ ID NO: 425 - protein, 243 aa, Artificial Sequence
  PSMA-6 LH
DIKMTQSPSSMYASLGERVTITCKASQDIYSYLIWFQQKPGKSPKTLIYRANRLVDGVPSRFSGSGSGQDYSLTISSLEYEDMGIYYCLQYDEFATFGSGTKLEMKGGGGSGGGGSGGGGSDVHLQESGPGLVKPSQSLSLTCTVTGYSITSDYAWNWIRQFPGNKLEWMGYISFSGSTSYNPSLKSRISVTRDTSKNQFFLQLNSVTTEDTATYYCARWNYYGSSHVWFAYWGQGTLVTVSS

SEQ ID NO: 426 - DNA, 729 bp, Artificial Sequence
  PSMA-6 LH
gacatcaagatgacccagtccccctcctccatgtacgcctccctgggcgagagagtgaccatcacctgcaaggcctcccaggacatctactcctacctgatctggttccagcagaagcctggcaagtcccctaagaccctgatctaccgggccaacagactggtggacggcgtgccttccaggttctccggctccggctctggccaggactactccctgaccatctcctccctggaatacgaggacatgggcatctactactgcctgcagtacgacgagttcgccaccttcggctccggcaccaagctggaaatgaagggcggagggggatctggcggcggaggaagtggcgggggaggatccgacgtgcacctgcaggaatctggccctggcctggtgaagccttcccagtccctgtccctgacctgcaccgtgaccggctactccatcacctccgactacgcctggaactggatccggcagttccctggcaataagctggaatggatgggctacatctccttctccggcagcacctcctacaacccttccctgaagtcccggatctccgtgacccgggacacctccaagaaccagttcttcctgcagctgaactccgtgaccaccgaggacaccgccacctactactgcgcccggtggaactactacggctcctcccacgtgtggttcgcttactggggccagggcaccctggtgaccgtgtcctcc

SEQ ID NO: 427 - protein, 497 aa, Artificial Sequence
  PSMA-6  LH x I2C HL
DIKMTQSPSSMYASLGERVTITCKASQDIYSYLIWFQQKPGKSPKTLIYRANRLVDGVPSRFSGSGSGQDYSLTISSLEYEDMGIYYCLQYDEFATFGSGTKLEMKGGGGSGGGGSGGGGSDVHLQESGPGLVKPSQSLSLTCTVTGYSITSDYAWNWIRQFPGNKLEWMGYISFSGSTSYNPSLKSRISVTRDTSKNQFFLQLNSVTTEDTATYYCARWNYYGSSHVWFAYWGQGTLVTVSSGGGGSEVQLVESGGGLVQPGGSLKLSCAASGFTFNKYAMNWVRQAPGKGLEWVARIRSKYNNYATYYADSVKDRFTISRDDSKNTAYLQMNNLKTEDTAVYYCVRHGNFGNSYISYWAYWGQGTLVTVSSGGGGSGGGGSGGGGSQTVVTQEPSLTVSPGGTVTLTCGSSTGAVTSGNYPNWVQQKPGQAPRGLIGGTKFLAPGTPARFSGSLLGGKAALTLSGVQPEDEAEYYCVLWYSNRWVFGGGTKLTVL

SEQ ID NO: 428 - DNA, 1491 bp, Artificial Sequence
  PSMA-6  LH x I2C HL
gacatcaagatgacccagtccccctcctccatgtacgcctccctgggcgagagagtgaccatcacctgcaaggcctcccaggacatctactcctacctgatctggttccagcagaagcctggcaagtcccctaagaccctgatctaccgggccaacagactggtggacggcgtgccttccaggttctccggctccggctctggccaggactactccctgaccatctcctccctggaatacgaggacatgggcatctactactgcctgcagtacgacgagttcgccaccttcggctccggcaccaagctggaaatgaagggcggagggggatctggcggcggaggaagtggcgggggaggatccgacgtgcacctgcaggaatctggccctggcctggtgaagccttcccagtccctgtccctgacctgcaccgtgaccggctactccatcacctccgactacgcctggaactggatccggcagttccctggcaataagctggaatggatgggctacatctccttctccggcagcacctcctacaacccttccctgaagtcccggatctccgtgacccgggacacctccaagaaccagttcttcctgcagctgaactccgtgaccaccgaggacaccgccacctactactgcgcccggtggaactactacggctcctcccacgtgtggttcgcttactggggccagggcaccctggtgaccgtgtcctccggaggtggtggatccgaggtgcagctggtcgagtctggaggaggattggtgcagcctggagggtcattgaaactctcatgtgcagcctctggattcaccttcaataagtacgccatgaactgggtccgccaggctccaggaaagggtttggaatgggttgctcgcataagaagtaaatataataattatgcaacatattatgccgattcagtgaaagacaggttcaccatctccagagatgattcaaaaaacactgcctatctacaaatgaacaacttgaaaactgaggacactgccgtgtactactgtgtgagacatgggaacttcggtaatagctacatatcctactgggcttactggggccaagggactctggtcaccgtctcctcaggtggtggtggttctggcggcggcggctccggtggtggtggttctcagactgttgtgactcaggaaccttcactcaccgtatcacctggtggaacagtcacactcacttgtggctcctcgactggggctgttacatctggcaactacccaaactgggtccaacaaaaaccaggtcaggcaccccgtggtctaataggtgggactaagttcctcgcccccggtactcctgccagattctcaggctccctgcttggaggcaaggctgccctcaccctctcaggggtacagccagaggatgaggcagaatattactgtgttctatggtacagcaaccgctgggtgttcggtggaggaaccaaactgactgtccta

SEQ ID NO: 429 - protein, 107 aa, Artificial Sequence
  PSMA-7 L
DIVMTQSHKFMSTSVGDRVSIICKASQDVGTAVDWYQQKPGQSPKLLIYWASTRHTGVPDRFTGSGSGTDFTLTITNVQSEDLADYFCQQYNSYPLTFGAGTMLDLK

SEQ ID NO: 430 - DNA, 321 bp, Artificial Sequence
  PSMA-7 L
gacatcgtgatgacccagtcccacaagttcatgtccacctccgtgggcgaccgggtgtccatcatctgcaaggcctcccaggatgtgggcaccgccgtggactggtatcagcagaagcctggccagtcccctaagctgctgatctactgggcctccaccagacacaccggcgtgcctgacagattcaccggctccggctctggcaccgacttcaccctgaccatcaccaacgtgcagtccgaggacctggccgactacttctgccagcagtacaactcctaccctctgaccttcggcgctggcaccatgctggacctgaag

SEQ ID NO: 431 - protein, 11 aa, Artificial Sequence
  PSMA-7 LCDR1
KASQDVGTAVD

SEQ ID NO: 432 - protein, 7 aa, Artificial Sequence
  PSMA-7 LCDR2
WASTRHT

SEQ ID NO: 433 - protein, 9 aa, Artificial Sequence
  PSMA-7 LCDR3
QQYNSYPLT

SEQ ID NO: 434 - protein, 115 aa, Artificial Sequence
  PSMA-7 H
EVQLQQSGPELVKPGTSVRISCKTSGYTFTEYTIHWVKQSHGKSLEWIGNINPNNGGTTYNQKFEDKATLTVDKSSSTAYMELRSLTSEDSAVYYCAAGWNFDYWGQGTTLTVSS

SEQ ID NO: 435 - DNA, 345 bp, Artificial Sequence
  PSMA-7 H
gaagtgcagctgcagcagtccggccctgagctggtgaagcctggcacctccgtgcggatctcttgcaagacctccggctacaccttcaccgagtacaccatccactgggtgaaacagtcccacggcaagtccctggaatggatcggcaacatcaaccctaacaacggcggcaccacctacaaccagaagttcgaggacaaggccaccctgaccgtggacaagtcctcctccaccgcctacatggaactgcggtccctgacctccgaggactccgccgtgtactactgcgccgctggctggaacttcgactactggggccagggcaccacactgaccgtgtcctcc

SEQ ID NO: 436 - protein, 5 aa, Artificial Sequence
  PSMA-7 HCDR1
EYTIH

SEQ ID NO: 437 - protein, 17 aa, Artificial Sequence
  PSMA-7 HCDR2
NINPNNGGTTYNQKFED

SEQ ID NO: 438 - protein, 6 aa, Artificial Sequence
  PSMA-7 HCDR3
GWNFDY

SEQ ID NO: 439 - protein, 237 aa, Artificial Sequence
  PSMA-7 LH
DIVMTQSHKFMSTSVGDRVSIICKASQDVGTAVDWYQQKPGQSPKLLIYWASTRHTGVPDRFTGSGSGTDFTLTITNVQSEDLADYFCQQYNSYPLTFGAGTMLDLKGGGGSGGGGSGGGGSEVQLQQSGPELVKPGTSVRISCKTSGYTFTEYTIHWVKQSHGKSLEWIGNINPNNGGTTYNQKFEDKATLTVDKSSSTAYMELRSLTSEDSAVYYCAAGWNFDYWGQGTTLTVSS

SEQ ID NO: 440 - DNA, 711 bp, Artificial Sequence
  PSMA-7 LH
gacatcgtgatgacccagtcccacaagttcatgtccacctccgtgggcgaccgggtgtccatcatctgcaaggcctcccaggatgtgggcaccgccgtggactggtatcagcagaagcctggccagtcccctaagctgctgatctactgggcctccaccagacacaccggcgtgcctgacagattcaccggctccggctctggcaccgacttcaccctgaccatcaccaacgtgcagtccgaggacctggccgactacttctgccagcagtacaactcctaccctctgaccttcggcgctggcaccatgctggacctgaagggcggagggggctctggcggcggaggaagtggagggggcggatccgaagtgcagctgcagcagtccggccctgagctggtgaagcctggcacctccgtgcggatctcttgcaagacctccggctacaccttcaccgagtacaccatccactgggtgaaacagtcccacggcaagtccctggaatggatcggcaacatcaaccctaacaacggcggcaccacctacaaccagaagttcgaggacaaggccaccctgaccgtggacaagtcctcctccaccgcctacatggaactgcggtccctgacctccgaggactccgccgtgtactactgcgccgctggctggaacttcgactactggggccagggcaccacactgaccgtgtcctcc

SEQ ID NO: 441 - protein, 491 aa, Artificial Sequence
  PSMA-7  LH x I2C HL
DIVMTQSHKFMSTSVGDRVSIICKASQDVGTAVDWYQQKPGQSPKLLIYWASTRHTGVPDRFTGSGSGTDFTLTITNVQSEDLADYFCQQYNSYPLTFGAGTMLDLKGGGGSGGGGSGGGGSEVQLQQSGPELVKPGTSVRISCKTSGYTFTEYTIHWVKQSHGKSLEWIGNINPNNGGTTYNQKFEDKATLTVDKSSSTAYMELRSLTSEDSAVYYCAAGWNFDYWGQGTTLTVSSGGGGSEVQLVESGGGLVQPGGSLKLSCAASGFTFNKYAMNWVRQAPGKGLEWVARIRSKYNNYATYYADSVKDRFTISRDDSKNTAYLQMNNLKTEDTAVYYCVRHGNFGNSYISYWAYWGQGTLVTVSSGGGGSGGGGSGGGGSQTVVTQEPSLTVSPGGTVTLTCGSSTGAVTSGNYPNWVQQKPGQAPRGLIGGTKFLAPGTPARFSGSLLGGKAALTLSGVQPEDEAEYYCVLWYSNRWVFGGGTKLTVL

SEQ ID NO: 442 - DNA, 1473 bp, Artificial Sequence
  PSMA-7  LH x I2C HL
gacatcgtgatgacccagtcccacaagttcatgtccacctccgtgggcgaccgggtgtccatcatctgcaaggcctcccaggatgtgggcaccgccgtggactggtatcagcagaagcctggccagtcccctaagctgctgatctactgggcctccaccagacacaccggcgtgcctgacagattcaccggctccggctctggcaccgacttcaccctgaccatcaccaacgtgcagtccgaggacctggccgactacttctgccagcagtacaactcctaccctctgaccttcggcgctggcaccatgctggacctgaagggcggagggggctctggcggcggaggaagtggagggggcggatccgaagtgcagctgcagcagtccggccctgagctggtgaagcctggcacctccgtgcggatctcttgcaagacctccggctacaccttcaccgagtacaccatccactgggtgaaacagtcccacggcaagtccctggaatggatcggcaacatcaaccctaacaacggcggcaccacctacaaccagaagttcgaggacaaggccaccctgaccgtggacaagtcctcctccaccgcctacatggaactgcggtccctgacctccgaggactccgccgtgtactactgcgccgctggctggaacttcgactactggggccagggcaccacactgaccgtgtcctccggaggtggtggatccgaggtgcagctggtcgagtctggaggaggattggtgcagcctggagggtcattgaaactctcatgtgcagcctctggattcaccttcaataagtacgccatgaactgggtccgccaggctccaggaaagggtttggaatgggttgctcgcataagaagtaaatataataattatgcaacatattatgccgattcagtgaaagacaggttcaccatctccagagatgattcaaaaaacactgcctatctacaaatgaacaacttgaaaactgaggacactgccgtgtactactgtgtgagacatgggaacttcggtaatagctacatatcctactgggcttactggggccaagggactctggtcaccgtctcctcaggtggtggtggttctggcggcggcggctccggtggtggtggttctcagactgttgtgactcaggaaccttcactcaccgtatcacctggtggaacagtcacactcacttgtggctcctcgactggggctgttacatctggcaactacccaaactgggtccaacaaaaaccaggtcaggcaccccgtggtctaataggtgggactaagttcctcgcccccggtactcctgccagattctcaggctccctgcttggaggcaaggctgccctcaccctctcaggggtacagccagaggatgaggcagaatattactgtgttctatggtacagcaaccgctgggtgttcggtggaggaaccaaactgactgtccta

SEQ ID NO: 443 - protein, 111 aa, Artificial Sequence
  PSMA-8 L
DIVLTQSPASLAVSLGQRATISCRASESIDSYDNTFMHWYQQKPGQPPNLLIFRASILESGIPARFSGSGSGTDFTLTIYPVEADDVATYYCHQSIEDPYTFGGGTKLEIK

SEQ ID NO: 444 - DNA, 333 bp, Artificial Sequence
  PSMA-8 L
gacatcgtgctgacccagtctccagcctccctggctgtgtctctgggccagcgggccaccatctcttgccgggcctccgagtccatcgactcctacgacaacaccttcatgcactggtatcagcagaagcctggccagcctcctaacctgctgatcttccgggcctctatcctggaatccggcatccctgcccggttctccggctctggctccggcaccgacttcaccctgaccatctaccctgtggaggccgacgacgtggccacctactactgccaccagtccatcgaggacccttacaccttcggcggagggaccaagctggaaatcaag

SEQ ID NO: 445 - protein, 15 aa, Artificial Sequence
  PSMA-8 LCDR1
RASESIDSYDNTFMH

SEQ ID NO: 446 - protein, 7 aa, Artificial Sequence
  PSMA-8 LCDR2
RASILES

SEQ ID NO: 447 - protein, 9 aa, Artificial Sequence
  PSMA-8 LCDR3
HQSIEDPYT

SEQ ID NO: 448 - protein, 118 aa, Artificial Sequence
  PSMA-8 H
EVQLQQSGPELVKPGASVKMSCKASGYTFTGYVMHWVKQKPGQVLEWIGYINPYNDVTRYNGKFKGKATLTSDKYSSTAYMELSGLTSEDSAVYYCARGENWYYFDSWGRGATLTVSS

SEQ ID NO: 449 - DNA, 354 bp, Artificial Sequence
  PSMA-8 H
gaagtgcagctgcagcagtccggccctgagctggtgaagcctggcgcctccgtgaagatgtcctgcaaggcctccggctacaccttcaccggctacgtgatgcactgggtgaaacagaaacccggccaggtgctggaatggatcggctacatcaacccttacaacgacgtgacccggtacaacggcaagttcaagggcaaggccaccctgacctccgacaagtactcctccaccgcctacatggaactgtccggcctgacctctgaggactccgccgtgtactactgcgccaggggcgagaactggtactacttcgactcctggggcagaggcgctaccctgaccgtgtcttcc

SEQ ID NO: 450 - protein, 5 aa, Artificial Sequence
  PSMA-8 HCDR1
GYVMH

SEQ ID NO: 451 - protein, 17 aa, Artificial Sequence
  PSMA-8 HCDR2
YINPYNDVTRYNGKFKG

SEQ ID NO: 452 - protein, 9 aa, Artificial Sequence
  PSMA-8 HCDR3
GENWYYFDS

SEQ ID NO: 453 - protein, 244 aa, Artificial Sequence
  PSMA-8 LH
DIVLTQSPASLAVSLGQRATISCRASESIDSYDNTFMHWYQQKPGQPPNLLIFRASILESGIPARFSGSGSGTDFTLTIYPVEADDVATYYCHQSIEDPYTFGGGTKLEIKGGGGSGGGGSGGGGSEVQLQQSGPELVKPGASVKMSCKASGYTFTGYVMHWVKQKPGQVLEWIGYINPYNDVTRYNGKFKGKATLTSDKYSSTAYMELSGLTSEDSAVYYCARGENWYYFDSWGRGATLTVSS

SEQ ID NO: 454 - DNA, 732 bp, Artificial Sequence
  PSMA-8 LH
gacatcgtgctgacccagtctccagcctccctggctgtgtctctgggccagcgggccaccatctcttgccgggcctccgagtccatcgactcctacgacaacaccttcatgcactggtatcagcagaagcctggccagcctcctaacctgctgatcttccgggcctctatcctggaatccggcatccctgcccggttctccggctctggctccggcaccgacttcaccctgaccatctaccctgtggaggccgacgacgtggccacctactactgccaccagtccatcgaggacccttacaccttcggcggagggaccaagctggaaatcaagggcggagggggatctggcggcggaggaagtggagggggcggatccgaagtgcagctgcagcagtccggccctgagctggtgaagcctggcgcctccgtgaagatgtcctgcaaggcctccggctacaccttcaccggctacgtgatgcactgggtgaaacagaaacccggccaggtgctggaatggatcggctacatcaacccttacaacgacgtgacccggtacaacggcaagttcaagggcaaggccaccctgacctccgacaagtactcctccaccgcctacatggaactgtccggcctgacctctgaggactccgccgtgtactactgcgccaggggcgagaactggtactacttcgactcctggggcagaggcgctaccctgaccgtgtcttcc

SEQ ID NO: 455 - protein, 498 aa, Artificial Sequence
  PSMA-8  LH x I2C HL
DIVLTQSPASLAVSLGQRATISCRASESIDSYDNTFMHWYQQKPGQPPNLLIFRASILESGIPARFSGSGSGTDFTLTIYPVEADDVATYYCHQSIEDPYTFGGGTKLEIKGGGGSGGGGSGGGGSEVQLQQSGPELVKPGASVKMSCKASGYTFTGYVMHWVKQKPGQVLEWIGYINPYNDVTRYNGKFKGKATLTSDKYSSTAYMELSGLTSEDSAVYYCARGENWYYFDSWGRGATLTVSSGGGGSEVQLVESGGGLVQPGGSLKLSCAASGFTFNKYAMNWVRQAPGKGLEWVARIRSKYNNYATYYADSVKDRFTISRDDSKNTAYLQMNNLKTEDTAVYYCVRHGNFGNSYISYWAYWGQGTLVTVSSGGGGSGGGGSGGGGSQTVVTQEPSLTVSPGGTVTLTCGSSTGAVTSGNYPNWVQQKPGQAPRGLIGGTKFLAPGTPARFSGSLLGGKAALTLSGVQPEDEAEYYCVLWYSNRWVFGGGTKLTVL

SEQ ID NO: 456 - DNA, 1494 bp, Artificial Sequence
  PSMA-8  LH x I2C HL
gacatcgtgctgacccagtctccagcctccctggctgtgtctctgggccagcgggccaccatctcttgccgggcctccgagtccatcgactcctacgacaacaccttcatgcactggtatcagcagaagcctggccagcctcctaacctgctgatcttccgggcctctatcctggaatccggcatccctgcccggttctccggctctggctccggcaccgacttcaccctgaccatctaccctgtggaggccgacgacgtggccacctactactgccaccagtccatcgaggacccttacaccttcggcggagggaccaagctggaaatcaagggcggagggggatctggcggcggaggaagtggagggggcggatccgaagtgcagctgcagcagtccggccctgagctggtgaagcctggcgcctccgtgaagatgtcctgcaaggcctccggctacaccttcaccggctacgtgatgcactgggtgaaacagaaacccggccaggtgctggaatggatcggctacatcaacccttacaacgacgtgacccggtacaacggcaagttcaagggcaaggccaccctgacctccgacaagtactcctccaccgcctacatggaactgtccggcctgacctctgaggactccgccgtgtactactgcgccaggggcgagaactggtactacttcgactcctggggcagaggcgctaccctgaccgtgtcttccggaggtggtggatccgaggtgcagctggtcgagtctggaggaggattggtgcagcctggagggtcattgaaactctcatgtgcagcctctggattcaccttcaataagtacgccatgaactgggtccgccaggctccaggaaagggtttggaatgggttgctcgcataagaagtaaatataataattatgcaacatattatgccgattcagtgaaagacaggttcaccatctccagagatgattcaaaaaacactgcctatctacaaatgaacaacttgaaaactgaggacactgccgtgtactactgtgtgagacatgggaacttcggtaatagctacatatcctactgggcttactggggccaagggactctggtcaccgtctcctcaggtggtggtggttctggcggcggcggctccggtggtggtggttctcagactgttgtgactcaggaaccttcactcaccgtatcacctggtggaacagtcacactcacttgtggctcctcgactggggctgttacatctggcaactacccaaactgggtccaacaaaaaccaggtcaggcaccccgtggtctaataggtgggactaagttcctcgcccccggtactcctgccagattctcaggctccctgcttggaggcaaggctgccctcaccctctcaggggtacagccagaggatgaggcagaatattactgtgttctatggtacagcaaccgctgggtgttcggtggaggaaccaaactgactgtccta

SEQ ID NO: 457 - protein, 107 aa, Artificial Sequence
  PSMA-9 L
NIVMTQSQKFMSTSPGDRVRVTCKASQNVGSDVAWYQAKPGQSPRILIYSTSYRYSGVPDRFTAYGSGTDFTLTITNVQSEDLTEYFCQQYNSYPLTFGAGTKLELK

SEQ ID NO: 458 - DNA, 321 bp, Artificial Sequence
  PSMA-9 L
aacatcgtgatgacccagtcccagaaattcatgtccacctctcccggcgatagagtgcgcgtgacctgcaaggcctcccagaacgtgggctccgacgtggcctggtatcaggccaagcctggccagtcccctcggatcctgatctactccacctcctaccggtactccggcgtgcctgacagattcaccgcctacggctccggcaccgacttcaccctgaccattacaaacgtgcagtccgaggacctgaccgagtacttctgccagcagtacaactcctaccctctgaccttcggcgctggcaccaagctggaactgaag

SEQ ID NO: 459 - protein, 11 aa, Artificial Sequence
  PSMA-9 LCDR1
KASQNVGSDVA

SEQ ID NO: 460 - protein, 7 aa, Artificial Sequence
  PSMA-9 LCDR2
STSYRYS

SEQ ID NO: 461 - protein, 9 aa, Artificial Sequence
  PSMA-9 LCDR3
QQYNSYPLT

SEQ ID NO: 462 - protein, 121 aa, Artificial Sequence
  PSMA-9 H
QVQLKESGPGLVASSQSLSITCTVSGFSLTAYGINWVRQPPGKGLEWLGVIWPDGNTDYNSTLKSRLNIFKDNSKNQVFLKMSSFQTDDTARYFCARDSYGNFKRGWFDFWGQGTTLTVSS

SEQ ID NO: 463 - DNA, 363 bp, Artificial Sequence
  PSMA-9 H
caggtgcagctgaaagagtccggccctggcctggtggcctcctcccagtccctgtccatcacctgcaccgtgtcaggcttctccctgaccgcttacggcatcaactgggtgcgccagcctcctggcaagggcctggaatggctgggcgtgatctggcctgacggcaacaccgactacaacagcaccctgaagtcccggctgaacatcttcaaggacaactccaagaaccaggtgttcctgaagatgtcctctttccagaccgacgacaccgcccggtacttttgcgccagggactcctacggcaacttcaagcggggctggttcgatttttggggccagggcaccacactgaccgtgtcctcc

SEQ ID NO: 464 - protein, 5 aa, Artificial Sequence
  PSMA-9 HCDR1
AYGIN

SEQ ID NO: 465 - protein, 16 aa, Artificial Sequence
  PSMA-9 HCDR2
VIWPDGNTDYNSTLKS

SEQ ID NO: 466 - protein, 13 aa, Artificial Sequence
  PSMA-9 HCDR3
DSYGNFKRGWFDF

SEQ ID NO: 467 - protein, 243 aa, Artificial Sequence
  PSMA-9 LH
NIVMTQSQKFMSTSPGDRVRVTCKASQNVGSDVAWYQAKPGQSPRILIYSTSYRYSGVPDRFTAYGSGTDFTLTITNVQSEDLTEYFCQQYNSYPLTFGAGTKLELKGGGGSGGGGSGGGGSQVQLKESGPGLVASSQSLSITCTVSGFSLTAYGINWVRQPPGKGLEWLGVIWPDGNTDYNSTLKSRLNIFKDNSKNQVFLKMSSFQTDDTARYFCARDSYGNFKRGWFDFWGQGTTLTVSS

SEQ ID NO: 468 - DNA, 729 bp, Artificial Sequence
  PSMA-9 LH
aacatcgtgatgacccagtcccagaaattcatgtccacctctcccggcgatagagtgcgcgtgacctgcaaggcctcccagaacgtgggctccgacgtggcctggtatcaggccaagcctggccagtcccctcggatcctgatctactccacctcctaccggtactccggcgtgcctgacagattcaccgcctacggctccggcaccgacttcaccctgaccattacaaacgtgcagtccgaggacctgaccgagtacttctgccagcagtacaactcctaccctctgaccttcggcgctggcaccaagctggaactgaagggcggagggggctctggcggcggaggaagtggagggggcggatctcaggtgcagctgaaagagtccggccctggcctggtggcctcctcccagtccctgtccatcacctgcaccgtgtcaggcttctccctgaccgcttacggcatcaactgggtgcgccagcctcctggcaagggcctggaatggctgggcgtgatctggcctgacggcaacaccgactacaacagcaccctgaagtcccggctgaacatcttcaaggacaactccaagaaccaggtgttcctgaagatgtcctctttccagaccgacgacaccgcccggtacttttgcgccagggactcctacggcaacttcaagcggggctggttcgatttttggggccagggcaccacactgaccgtgtcctcc

SEQ ID NO: 469 - protein, 497 aa, Artificial Sequence
  PSMA-9  LH x I2C HL
NIVMTQSQKFMSTSPGDRVRVTCKASQNVGSDVAWYQAKPGQSPRILIYSTSYRYSGVPDRFTAYGSGTDFTLTITNVQSEDLTEYFCQQYNSYPLTFGAGTKLELKGGGGSGGGGSGGGGSQVQLKESGPGLVASSQSLSITCTVSGFSLTAYGINWVRQPPGKGLEWLGVIWPDGNTDYNSTLKSRLNIFKDNSKNQVFLKMSSFQTDDTARYFCARDSYGNFKRGWFDFWGQGTTLTVSSGGGGSEVQLVESGGGLVQPGGSLKLSCAASGFTFNKYAMNWVRQAPGKGLEWVARIRSKYNNYATYYADSVKDRFTISRDDSKNTAYLQMNNLKTEDTAVYYCVRHGNFGNSYISYWAYWGQGTLVTVSSGGGGSGGGGSGGGGSQTVVTQEPSLTVSPGGTVTLTCGSSTGAVTSGNYPNWVQQKPGQAPRGLIGGTKFLAPGTPARFSGSLLGGKAALTLSGVQPEDEAEYYCVLWYSNRWVFGGGTKLTVL

SEQ ID NO: 470 - DNA, 1491 bp, Artificial Sequence
  PSMA-9  LH x I2C HL
aacatcgtgatgacccagtcccagaaattcatgtccacctctcccggcgatagagtgcgcgtgacctgcaaggcctcccagaacgtgggctccgacgtggcctggtatcaggccaagcctggccagtcccctcggatcctgatctactccacctcctaccggtactccggcgtgcctgacagattcaccgcctacggctccggcaccgacttcaccctgaccattacaaacgtgcagtccgaggacctgaccgagtacttctgccagcagtacaactcctaccctctgaccttcggcgctggcaccaagctggaactgaagggcggagggggctctggcggcggaggaagtggagggggcggatctcaggtgcagctgaaagagtccggccctggcctggtggcctcctcccagtccctgtccatcacctgcaccgtgtcaggcttctccctgaccgcttacggcatcaactgggtgcgccagcctcctggcaagggcctggaatggctgggcgtgatctggcctgacggcaacaccgactacaacagcaccctgaagtcccggctgaacatcttcaaggacaactccaagaaccaggtgttcctgaagatgtcctctttccagaccgacgacaccgcccggtacttttgcgccagggactcctacggcaacttcaagcggggctggttcgatttttggggccagggcaccacactgaccgtgtcctccggaggtggtggatccgaggtgcagctggtcgagtctggaggaggattggtgcagcctggagggtcattgaaactctcatgtgcagcctctggattcaccttcaataagtacgccatgaactgggtccgccaggctccaggaaagggtttggaatgggttgctcgcataagaagtaaatataataattatgcaacatattatgccgattcagtgaaagacaggttcaccatctccagagatgattcaaaaaacactgcctatctacaaatgaacaacttgaaaactgaggacactgccgtgtactactgtgtgagacatgggaacttcggtaatagctacatatcctactgggcttactggggccaagggactctggtcaccgtctcctcaggtggtggtggttctggcggcggcggctccggtggtggtggttctcagactgttgtgactcaggaaccttcactcaccgtatcacctggtggaacagtcacactcacttgtggctcctcgactggggctgttacatctggcaactacccaaactgggtccaacaaaaaccaggtcaggcaccccgtggtctaataggtgggactaagttcctcgcccccggtactcctgccagattctcaggctccctgcttggaggcaaggctgccctcaccctctcaggggtacagccagaggatgaggcagaatattactgtgttctatggtacagcaaccgctgggtgttcggtggaggaaccaaactgactgtccta

SEQ ID NO: 471 - protein, 107 aa, Artificial Sequence
  PSMA-10 VL
NIVMTQFPKSMSISVGERVTLTCKASENVGTYVSWYQQKPEQSPKMLIYGASNRFTGVPDRFTGSGSATDFILTISSVQTEDLVDYYCGQSYTFPYTFGGGTKLEMK

SEQ ID NO: 472 - DNA, 321 bp, Artificial Sequence
  PSMA-10 VL
aacatcgtgatgacccagttccctaagtccatgtccatctccgtgggcgagagagtgaccctgacctgcaaggcctccgagaacgtgggcacctacgtgtcctggtatcagcagaagcctgagcagtcccctaagatgctgatctacggcgcctccaacaggttcaccggcgtgcctgacagattcaccggctccggctccgccaccgacttcatcctgaccatctccagcgtgcagaccgaggacctggtggactactactgcggccagtcctacaccttcccttacaccttcggcggagggaccaagctggaaatgaag

SEQ ID NO: 473 - protein, 11 aa, Artificial Sequence
  PSMA-10 LCDR1
KASENVGTYVS

SEQ ID NO: 474 - protein, 7 aa, Artificial Sequence
  PSMA-10 LCDR2
GASNRFT

SEQ ID NO: 475 - protein, 9 aa, Artificial Sequence
  PSMA-10 LCDR3
GQSYTFPYT

SEQ ID NO: 476 - protein, 116 aa, Artificial Sequence
  PSMA-10 VH
EVKLEESGGGLVQPGGSMKLSCVASGFTFSNYWMNWVRQSPEKGLEWVAEIRSQSNNFATHYAESVKGRVIISRDDSKSSVYLQMNNLRAEDTGIYYCTRRWNNFWGQGTTLTVSS

SEQ ID NO: 477 - DNA, 348 bp, Artificial Sequence
  PSMA-10 VH
gaagtgaagctggaagagtccggcggaggactggtgcagcctggcggctccatgaagctgtcctgcgtggcttccggcttcaccttctccaactactggatgaactgggtgcgccagtcccctgagaagggcctggaatgggtggccgagatccggtcccagtccaacaacttcgccacccactacgccgagtccgtgaagggcagagtgatcatctcccgggacgactccaagtcctccgtgtacctgcagatgaacaacctgcgggccgaggacaccggcatctactactgcacccggcggtggaacaacttttggggccagggcaccacactgaccgtgtcctcc

SEQ ID NO: 478 - protein, 5 aa, Artificial Sequence
  PSMA-10 HCDR1
NYWMN

SEQ ID NO: 479 - protein, 19 aa, Artificial Sequence
  PSMA-10 HCDR2
EIRSQSNNFATHYAESVKG

SEQ ID NO: 480 - protein, 5 aa, Artificial Sequence
  PSMA-10 HCDR3
RWNNF

SEQ ID NO: 481 - protein, 238 aa, Artificial Sequence
  PSMA-10 LH
NIVMTQFPKSMSISVGERVTLTCKASENVGTYVSWYQQKPEQSPKMLIYGASNRFTGVPDRFTGSGSATDFILTISSVQTEDLVDYYCGQSYTFPYTFGGGTKLEMKGGGGSGGGGSGGGGSEVKLEESGGGLVQPGGSMKLSCVASGFTFSNYWMNWVRQSPEKGLEWVAEIRSQSNNFATHYAESVKGRVIISRDDSKSSVYLQMNNLRAEDTGIYYCTRRWNNFWGQGTTLTVSS

SEQ ID NO: 482 - DNA, 714 bp, Artificial Sequence
  PSMA-10 LH
aacatcgtgatgacccagttccctaagtccatgtccatctccgtgggcgagagagtgaccctgacctgcaaggcctccgagaacgtgggcacctacgtgtcctggtatcagcagaagcctgagcagtcccctaagatgctgatctacggcgcctccaacaggttcaccggcgtgcctgacagattcaccggctccggctccgccaccgacttcatcctgaccatctccagcgtgcagaccgaggacctggtggactactactgcggccagtcctacaccttcccttacaccttcggcggagggaccaagctggaaatgaagggcggagggggatctggcggcggaggaagtggagggggcggatccgaagtgaagctggaagagtccggcggaggactggtgcagcctggcggctccatgaagctgtcctgcgtggcttccggcttcaccttctccaactactggatgaactgggtgcgccagtcccctgagaagggcctggaatgggtggccgagatccggtcccagtccaacaacttcgccacccactacgccgagtccgtgaagggcagagtgatcatctcccgggacgactccaagtcctccgtgtacctgcagatgaacaacctgcgggccgaggacaccggcatctactactgcacccggcggtggaacaacttttggggccagggcaccacactgaccgtgtcctcc

SEQ ID NO: 483 - protein, 492 aa, Artificial Sequence
  PSMA-10  LH x I2C HL
NIVMTQFPKSMSISVGERVTLTCKASENVGTYVSWYQQKPEQSPKMLIYGASNRFTGVPDRFTGSGSATDFILTISSVQTEDLVDYYCGQSYTFPYTFGGGTKLEMKGGGGSGGGGSGGGGSEVKLEESGGGLVQPGGSMKLSCVASGFTFSNYWMNWVRQSPEKGLEWVAEIRSQSNNFATHYAESVKGRVIISRDDSKSSVYLQMNNLRAEDTGIYYCTRRWNNFWGQGTTLTVSSGGGGSEVQLVESGGGLVQPGGSLKLSCAASGFTFNKYAMNWVRQAPGKGLEWVARIRSKYNNYATYYADSVKDRFTISRDDSKNTAYLQMNNLKTEDTAVYYCVRHGNFGNSYISYWAYWGQGTLVTVSSGGGGSGGGGSGGGGSQTVVTQEPSLTVSPGGTVTLTCGSSTGAVTSGNYPNWVQQKPGQAPRGLIGGTKFLAPGTPARFSGSLLGGKAALTLSGVQPEDEAEYYCVLWYSNRWVFGGGTKLTVL

SEQ ID NO: 484 - DNA, 1476 bp, Artificial Sequence
  PSMA-10  LH x I2C HL
aacatcgtgatgacccagttccctaagtccatgtccatctccgtgggcgagagagtgaccctgacctgcaaggcctccgagaacgtgggcacctacgtgtcctggtatcagcagaagcctgagcagtcccctaagatgctgatctacggcgcctccaacaggttcaccggcgtgcctgacagattcaccggctccggctccgccaccgacttcatcctgaccatctccagcgtgcagaccgaggacctggtggactactactgcggccagtcctacaccttcccttacaccttcggcggagggaccaagctggaaatgaagggcggagggggatctggcggcggaggaagtggagggggcggatccgaagtgaagctggaagagtccggcggaggactggtgcagcctggcggctccatgaagctgtcctgcgtggcttccggcttcaccttctccaactactggatgaactgggtgcgccagtcccctgagaagggcctggaatgggtggccgagatccggtcccagtccaacaacttcgccacccactacgccgagtccgtgaagggcagagtgatcatctcccgggacgactccaagtcctccgtgtacctgcagatgaacaacctgcgggccgaggacaccggcatctactactgcacccggcggtggaacaacttttggggccagggcaccacactgaccgtgtcctccggaggtggtggatccgaggtgcagctggtcgagtctggaggaggattggtgcagcctggagggtcattgaaactctcatgtgcagcctctggattcaccttcaataagtacgccatgaactgggtccgccaggctccaggaaagggtttggaatgggttgctcgcataagaagtaaatataataattatgcaacatattatgccgattcagtgaaagacaggttcaccatctccagagatgattcaaaaaacactgcctatctacaaatgaacaacttgaaaactgaggacactgccgtgtactactgtgtgagacatgggaacttcggtaatagctacatatcctactgggcttactggggccaagggactctggtcaccgtctcctcaggtggtggtggttctggcggcggcggctccggtggtggtggttctcagactgttgtgactcaggaaccttcactcaccgtatcacctggtggaacagtcacactcacttgtggctcctcgactggggctgttacatctggcaactacccaaactgggtccaacaaaaaccaggtcaggcaccccgtggtctaataggtgggactaagttcctcgcccccggtactcctgccagattctcaggctccctgcttggaggcaaggctgccctcaccctctcaggggtacagccagaggatgaggcagaatattactgtgttctatggtacagcaaccgctgggtgttcggtggaggaaccaaactgactgtccta

SEQ ID NO: 485 - protein, 107 aa, Artificial Sequence
  PSMA-A VL
DIQMTQSPSSLSASVGDRVTITCRASQGISNYLAWYQQKTGKVPKFLIYEASTLQSGVPSRFSGGGSGTDFTLTISSLQPEDVATYYCQNYNSAPFTFGPGTKVDIK

SEQ ID NO: 486 - DNA, 321 bp, Artificial Sequence
  PSMA-A VL
gacatccagatgacccagtccccctcctccctgtctgcctccgtgggcgacagagtgaccatcacctgccgggcctcccagggcatctccaactacctggcctggtatcagcagaaaaccggcaaggtgcccaagttcctgatctacgaggcctccaccctgcagtccggcgtgccttccagattctctggcggcggatccggcaccgacttcaccctgaccatctccagcctgcagcctgaggacgtggccacctactactgccagaactacaactccgcccctttcaccttcggccctggcaccaaggtggacatcaag

SEQ ID NO: 487 - protein, 11 aa, Artificial Sequence
  PSMA-A LCDR1
RASQGISNYLA

SEQ ID NO: 488 - protein, 7 aa, Artificial Sequence
  PSMA-A LCDR2
EASTLQS

SEQ ID NO: 489 - protein, 9 aa, Artificial Sequence
  PSMA-A LCDR3
QNYNSAPFT

SEQ ID NO: 490 - protein, 123 aa, Artificial Sequence
  PSMA-A VH
QVQLVESGGGVVQPGRSLRLSCAASGFAFSRYGMHWVRQAPGKGLEWVAVIWYDGSNKYYADSVKGRFTISRDNSKNTQYLQMNSLRAEDTAVYYCARGGDFLYYYYYGMDVWGQGTTVTVSS

SEQ ID NO: 491 - DNA, 369 bp, Artificial Sequence
  PSMA-A VH
caggtgcagctggtcgagtctggcggaggggtggtccagcctggccggtccctgagactgtcttgcgccgcctccggcttcgccttctccagatacggcatgcactgggtgcgccaggctccaggcaagggactggaatgggtggccgtgatttggtacgacggctccaacaagtactacgccgactccgtgaagggccggttcaccatctcccgggacaactccaagaacacccagtacctgcagatgaactccctgagggcagaggacaccgccgtgtactactgcgccagaggcggcgacttcctgtactactactattacggcatggacgtgtggggccagggcaccaccgtgacagtgtcttcc

SEQ ID NO: 492 - protein, 5 aa, Artificial Sequence
  PSMA-A HCDR1
RYGMH

SEQ ID NO: 493 - protein, 17 aa, Artificial Sequence
  PSMA-A HCDR2
VIWYDGSNKYYADSVKG

SEQ ID NO: 494 - protein, 14 aa, Artificial Sequence
  PSMA-A HCDR3
GGDFLYYYYYGMDV

SEQ ID NO: 495 - protein, 245 aa, Artificial Sequence
  PSMA-A LH
DIQMTQSPSSLSASVGDRVTITCRASQGISNYLAWYQQKTGKVPKFLIYEASTLQSGVPSRFSGGGSGTDFTLTISSLQPEDVATYYCQNYNSAPFTFGPGTKVDIKGGGGSGGGGSGGGGSQVQLVESGGGVVQPGRSLRLSCAASGFAFSRYGMHWVRQAPGKGLEWVAVIWYDGSNKYYADSVKGRFTISRDNSKNTQYLQMNSLRAEDTAVYYCARGGDFLYYYYYGMDVWGQGTTVTVSS

SEQ ID NO: 496 - DNA, 735 bp, Artificial Sequence
  PSMA-A LH
gacatccagatgacccagtccccctcctccctgtctgcctccgtgggcgacagagtgaccatcacctgccgggcctcccagggcatctccaactacctggcctggtatcagcagaaaaccggcaaggtgcccaagttcctgatctacgaggcctccaccctgcagtccggcgtgccttccagattctctggcggcggatccggcaccgacttcaccctgaccatctccagcctgcagcctgaggacgtggccacctactactgccagaactacaactccgcccctttcaccttcggccctggcaccaaggtggacatcaagggcggagggggcagtggcggcggaggaagtggagggggcggatctcaggtgcagctggtcgagtctggcggaggggtggtccagcctggccggtccctgagactgtcttgcgccgcctccggcttcgccttctccagatacggcatgcactgggtgcgccaggctccaggcaagggactggaatgggtggccgtgatttggtacgacggctccaacaagtactacgccgactccgtgaagggccggttcaccatctcccgggacaactccaagaacacccagtacctgcagatgaactccctgagggcagaggacaccgccgtgtactactgcgccagaggcggcgacttcctgtactactactattacggcatggacgtgtggggccagggcaccaccgtgacagtgtcttcc

SEQ ID NO: 497 - protein, 499 aa, Artificial Sequence
  PSMA-A  LH x I2C HL
DIQMTQSPSSLSASVGDRVTITCRASQGISNYLAWYQQKTGKVPKFLIYEASTLQSGVPSRFSGGGSGTDFTLTISSLQPEDVATYYCQNYNSAPFTFGPGTKVDIKGGGGSGGGGSGGGGSQVQLVESGGGVVQPGRSLRLSCAASGFAFSRYGMHWVRQAPGKGLEWVAVIWYDGSNKYYADSVKGRFTISRDNSKNTQYLQMNSLRAEDTAVYYCARGGDFLYYYYYGMDVWGQGTTVTVSSGGGGSEVQLVESGGGLVQPGGSLKLSCAASGFTFNKYAMNWVRQAPGKGLEWVARIRSKYNNYATYYADSVKDRFTISRDDSKNTAYLQMNNLKTEDTAVYYCVRHGNFGNSYISYWAYWGQGTLVTVSSGGGGSGGGGSGGGGSQTVVTQEPSLTVSPGGTVTLTCGSSTGAVTSGNYPNWVQQKPGQAPRGLIGGTKFLAPGTPARFSGSLLGGKAALTLSGVQPEDEAEYYCVLWYSNRWVFGGGTKLTVL

SEQ ID NO: 498 - DNA, 1497 bp, Artificial Sequence
  PSMA-A  LH x I2C HL
gacatccagatgacccagtccccctcctccctgtctgcctccgtgggcgacagagtgaccatcacctgccgggcctcccagggcatctccaactacctggcctggtatcagcagaaaaccggcaaggtgcccaagttcctgatctacgaggcctccaccctgcagtccggcgtgccttccagattctctggcggcggatccggcaccgacttcaccctgaccatctccagcctgcagcctgaggacgtggccacctactactgccagaactacaactccgcccctttcaccttcggccctggcaccaaggtggacatcaagggcggagggggcagtggcggcggaggaagtggagggggcggatctcaggtgcagctggtcgagtctggcggaggggtggtccagcctggccggtccctgagactgtcttgcgccgcctccggcttcgccttctccagatacggcatgcactgggtgcgccaggctccaggcaagggactggaatgggtggccgtgatttggtacgacggctccaacaagtactacgccgactccgtgaagggccggttcaccatctcccgggacaactccaagaacacccagtacctgcagatgaactccctgagggcagaggacaccgccgtgtactactgcgccagaggcggcgacttcctgtactactactattacggcatggacgtgtggggccagggcaccaccgtgacagtgtcttccggaggtggtggatccgaggtgcagctggtcgagtctggaggaggattggtgcagcctggagggtcattgaaactctcatgtgcagcctctggattcaccttcaataagtacgccatgaactgggtccgccaggctccaggaaagggtttggaatgggttgctcgcataagaagtaaatataataattatgcaacatattatgccgattcagtgaaagacaggttcaccatctccagagatgattcaaaaaacactgcctatctacaaatgaacaacttgaaaactgaggacactgccgtgtactactgtgtgagacatgggaacttcggtaatagctacatatcctactgggcttactggggccaagggactctggtcaccgtctcctcaggtggtggtggttctggcggcggcggctccggtggtggtggttctcagactgttgtgactcaggaaccttcactcaccgtatcacctggtggaacagtcacactcacttgtggctcctcgactggggctgttacatctggcaactacccaaactgggtccaacaaaaaccaggtcaggcaccccgtggtctaataggtgggactaagttcctcgcccccggtactcctgccagattctcaggctccctgcttggaggcaaggctgccctcaccctctcaggggtacagccagaggatgaggcagaatattactgtgttctatggtacagcaaccgctgggtgttcggtggaggaaccaaactgactgtccta

SEQ ID NO: 499 - protein, 107 aa, Artificial Sequence
  PSMA-B VL
DIQMTQSPSSLSASVGDRVTITCRASQGITNYLAWFQQKPGKAPKSLIYAASSLQSGVPSKFSGSGSGTDFSLTISSLQPEDFATYYCQQYNSYPITFGQGTRLEIK

SEQ ID NO: 500 - DNA, 321 bp, Artificial Sequence
  PSMA-B VL
gacatccagatgacccagtcaccctcctccctgtctgcctccgtgggcgacagagtgaccatcacctgccgggcctcacagggcatcaccaactacctggcctggttccagcagaagcctggcaaggcccctaagtccctgatctacgccgcctcctctctgcagtccggcgtgccttccaagttctccggctccggctctggcaccgacttctccctgaccatctcctccctgcagcctgaggacttcgccacctactactgccagcagtacaactcctaccctatcaccttcggccagggcacccggctggaaatcaag

SEQ ID NO: 501 - protein, 11 aa, Artificial Sequence
  PSMA-B LCDR1
RASQGITNYLA

SEQ ID NO: 502 - protein, 7 aa, Artificial Sequence
  PSMA-B LCDR2
AASSLQS

SEQ ID NO: 503 - protein, 9 aa, Artificial Sequence
  PSMA-B LCDR3
QQYNSYPIT

SEQ ID NO: 504 - protein, 124 aa, Artificial Sequence
  PSMA-B VH
QVQLVESGGGVVQPGRSLRLSCAASGFTFSNYVMHWVRQAPGKGLEWVAIIWYDGSNKYYADSVKGRFTISRDNSKNTLYLQMNSLRAEDTAVYYCAGGYNWNYEYHYYGMDVWGQGTTVTVSS

SEQ ID NO: 505 - DNA, 372 bp, Artificial Sequence
  PSMA-B VH
caggtgcagctggtcgagtctggcggaggggtggtgcagcctggccggtccctgagactgtcttgcgctgcctccggcttcaccttctccaactacgtgatgcactgggtgcgccaggctccaggcaagggactggaatgggtggccatcatttggtacgacggctccaacaagtactacgccgactccgtgaagggccggttcaccatctcccgggacaactccaagaacaccctgtacctgcagatgaactccctgagggccgaggacaccgccgtgtactactgcgctggcggctacaactggaactacgagtaccactactacggcatggacgtgtggggccagggaaccaccgtgaccgtgtcttcc

SEQ ID NO: 506 - protein, 5 aa, Artificial Sequence
  PSMA-B HCDR1
NYVMH

SEQ ID NO: 507 - protein, 17 aa, Artificial Sequence
  PSMA-B HCDR2
IIWYDGSNKYYADSVKG

SEQ ID NO: 508 - protein, 15 aa, Artificial Sequence
  PSMA-B HCDR3
GYNWNYEYHYYGMDV

SEQ ID NO: 509 - protein, 246 aa, Artificial Sequence
  PSMA-B LH
DIQMTQSPSSLSASVGDRVTITCRASQGITNYLAWFQQKPGKAPKSLIYAASSLQSGVPSKFSGSGSGTDFSLTISSLQPEDFATYYCQQYNSYPITFGQGTRLEIKGGGGSGGGGSGGGGSQVQLVESGGGVVQPGRSLRLSCAASGFTFSNYVMHWVRQAPGKGLEWVAIIWYDGSNKYYADSVKGRFTISRDNSKNTLYLQMNSLRAEDTAVYYCAGGYNWNYEYHYYGMDVWGQGTTVTVSS

SEQ ID NO: 510 - DNA, 738 bp, Artificial Sequence
  PSMA-B LH
gacatccagatgacccagtcaccctcctccctgtctgcctccgtgggcgacagagtgaccatcacctgccgggcctcacagggcatcaccaactacctggcctggttccagcagaagcctggcaaggcccctaagtccctgatctacgccgcctcctctctgcagtccggcgtgccttccaagttctccggctccggctctggcaccgacttctccctgaccatctcctccctgcagcctgaggacttcgccacctactactgccagcagtacaactcctaccctatcaccttcggccagggcacccggctggaaatcaagggcggagggggatctggcggcggaggaagtggagggggcggatctcaggtgcagctggtcgagtctggcggaggggtggtgcagcctggccggtccctgagactgtcttgcgctgcctccggcttcaccttctccaactacgtgatgcactgggtgcgccaggctccaggcaagggactggaatgggtggccatcatttggtacgacggctccaacaagtactacgccgactccgtgaagggccggttcaccatctcccgggacaactccaagaacaccctgtacctgcagatgaactccctgagggccgaggacaccgccgtgtactactgcgctggcggctacaactggaactacgagtaccactactacggcatggacgtgtggggccagggaaccaccgtgaccgtgtcttcc

SEQ ID NO: 511 - protein, 500 aa, Artificial Sequence
  PSMA-B  LH x I2C HL
DIQMTQSPSSLSASVGDRVTITCRASQGITNYLAWFQQKPGKAPKSLIYAASSLQSGVPSKFSGSGSGTDFSLTISSLQPEDFATYYCQQYNSYPITFGQGTRLEIKGGGGSGGGGSGGGGSQVQLVESGGGVVQPGRSLRLSCAASGFTFSNYVMHWVRQAPGKGLEWVAIIWYDGSNKYYADSVKGRFTISRDNSKNTLYLQMNSLRAEDTAVYYCAGGYNWNYEYHYYGMDVWGQGTTVTVSSGGGGSEVQLVESGGGLVQPGGSLKLSCAASGFTFNKYAMNWVRQAPGKGLEWVARIRSKYNNYATYYADSVKDRFTISRDDSKNTAYLQMNNLKTEDTAVYYCVRHGNFGNSYISYWAYWGQGTLVTVSSGGGGSGGGGSGGGGSQTVVTQEPSLTVSPGGTVTLTCGSSTGAVTSGNYPNWVQQKPGQAPRGLIGGTKFLAPGTPARFSGSLLGGKAALTLSGVQPEDEAEYYCVLWYSNRWVFGGGTKLTVL

SEQ ID NO: 512 - DNA, 1500 bp, Artificial Sequence
  PSMA-B  LH x I2C HL
gacatccagatgacccagtcaccctcctccctgtctgcctccgtgggcgacagagtgaccatcacctgccgggcctcacagggcatcaccaactacctggcctggttccagcagaagcctggcaaggcccctaagtccctgatctacgccgcctcctctctgcagtccggcgtgccttccaagttctccggctccggctctggcaccgacttctccctgaccatctcctccctgcagcctgaggacttcgccacctactactgccagcagtacaactcctaccctatcaccttcggccagggcacccggctggaaatcaagggcggagggggatctggcggcggaggaagtggagggggcggatctcaggtgcagctggtcgagtctggcggaggggtggtgcagcctggccggtccctgagactgtcttgcgctgcctccggcttcaccttctccaactacgtgatgcactgggtgcgccaggctccaggcaagggactggaatgggtggccatcatttggtacgacggctccaacaagtactacgccgactccgtgaagggccggttcaccatctcccgggacaactccaagaacaccctgtacctgcagatgaactccctgagggccgaggacaccgccgtgtactactgcgctggcggctacaactggaactacgagtaccactactacggcatggacgtgtggggccagggaaccaccgtgaccgtgtcttccggaggtggtggatccgaggtgcagctggtcgagtctggaggaggattggtgcagcctggagggtcattgaaactctcatgtgcagcctctggattcaccttcaataagtacgccatgaactgggtccgccaggctccaggaaagggtttggaatgggttgctcgcataagaagtaaatataataattatgcaacatattatgccgattcagtgaaagacaggttcaccatctccagagatgattcaaaaaacactgcctatctacaaatgaacaacttgaaaactgaggacactgccgtgtactactgtgtgagacatgggaacttcggtaatagctacatatcctactgggcttactggggccaagggactctggtcaccgtctcctcaggtggtggtggttctggcggcggcggctccggtggtggtggttctcagactgttgtgactcaggaaccttcactcaccgtatcacctggtggaacagtcacactcacttgtggctcctcgactggggctgttacatctggcaactacccaaactgggtccaacaaaaaccaggtcaggcaccccgtggtctaataggtgggactaagttcctcgcccccggtactcctgccagattctcaggctccctgcttggaggcaaggctgccctcaccctctcaggggtacagccagaggatgaggcagaatattactgtgttctatggtacagcaaccgctgggtgttcggtggaggaaccaaactgactgtccta

SEQ ID NO: 513 - protein, 107 aa, Artificial Sequence
  PSMA-C VL
DIQMTQSPSSLSASVGDRVTITCRASQGISHYLAWFQQKPGKAPKSLIYAASSLQSGVPSKFSGSGSGTDFTLTISSLQPEDFATYYCQQYNSFPLTFGGGTKVEIK

SEQ ID NO: 514 - DNA, 321 bp, Artificial Sequence
  PSMA-C VL
gacatccagatgacccagtctccctcctccctgtctgcctccgtgggcgacagagtgaccatcacctgccgggcctcccagggcatctctcactacctggcctggttccagcagaagcctggcaaggcccctaagtccctgatctacgccgcctcctctctgcagtccggcgtgccttccaagttctccggctccggctctggcaccgacttcaccctgaccatctccagcctgcagcctgaggacttcgccacctactactgccagcagtacaactccttccctctgaccttcggcggagggaccaaggtggagatcaag

SEQ ID NO: 515 - protein, 11 aa, Artificial Sequence
  PSMA-C LCDR1
RASQGISHYLA

SEQ ID NO: 516 - protein, 7 aa, Artificial Sequence
  PSMA-C LCDR2
AASSLQS

SEQ ID NO: 517 - protein, 9 aa, Artificial Sequence
  PSMA-C LCDR3
QQYNSFPLT

SEQ ID NO: 518 - protein, 126 aa, Artificial Sequence
  PSMA-C VH
QVQLVESGGGVVQPGRSLRLSCAASGFTFSSYGMHWVRQAPGKGLDWVAIIWHDGSNKYYADSVKGRFTISRDNSKKTLYLQMNSLRAEDTAVYYCARAWAYDYGDYEYYFGMDVWGQGTTVTVSS

SEQ ID NO: 519 - DNA, 378 bp, Artificial Sequence
  PSMA-C VH
caggtgcagctggtcgagtctggcggaggggtggtgcagcctggccggtccctgagactgtcttgtgccgcctccggcttcaccttctcctcttacggcatgcactgggtgcgccaggctccaggcaagggactggactgggtggccatcatctggcacgacggctccaacaagtactacgccgactccgtgaagggccggttcaccatctcccgggacaactccaagaaaaccctgtacctgcagatgaactccctgagggccgaggacaccgccgtgtactactgtgccagggcctgggcctacgactacggcgactacgagtactacttcggcatggacgtgtggggccagggcaccaccgtgacagtgtcttcc

SEQ ID NO: 520 - protein, 5 aa, Artificial Sequence
  PSMA-C HCDR1
SYGMH

SEQ ID NO: 521 - protein, 17 aa, Artificial Sequence
  PSMA-C HCDR2
IIWHDGSNKYYADSVKG

SEQ ID NO: 522 - protein, 17 aa, Artificial Sequence
  PSMA-C HCDR3
AWAYDYGDYEYYFGMDV

SEQ ID NO: 523 - protein, 248 aa, Artificial Sequence
  PSMA-C LH
DIQMTQSPSSLSASVGDRVTITCRASQGISHYLAWFQQKPGKAPKSLIYAASSLQSGVPSKFSGSGSGTDFTLTISSLQPEDFATYYCQQYNSFPLTFGGGTKVEIKGGGGSGGGGSGGGGSQVQLVESGGGVVQPGRSLRLSCAASGFTFSSYGMHWVRQAPGKGLDWVAIIWHDGSNKYYADSVKGRFTISRDNSKKTLYLQMNSLRAEDTAVYYCARAWAYDYGDYEYYFGMDVWGQGTTVTVSS

SEQ ID NO: 524 - DNA, 744 bp, Artificial Sequence
  PSMA-C LH
gacatccagatgacccagtctccctcctccctgtctgcctccgtgggcgacagagtgaccatcacctgccgggcctcccagggcatctctcactacctggcctggttccagcagaagcctggcaaggcccctaagtccctgatctacgccgcctcctctctgcagtccggcgtgccttccaagttctccggctccggctctggcaccgacttcaccctgaccatctccagcctgcagcctgaggacttcgccacctactactgccagcagtacaactccttccctctgaccttcggcggagggaccaaggtggagatcaagggcggagggggctctggcggcggaggaagtggagggggcggatctcaggtgcagctggtcgagtctggcggaggggtggtgcagcctggccggtccctgagactgtcttgtgccgcctccggcttcaccttctcctcttacggcatgcactgggtgcgccaggctccaggcaagggactggactgggtggccatcatctggcacgacggctccaacaagtactacgccgactccgtgaagggccggttcaccatctcccgggacaactccaagaaaaccctgtacctgcagatgaactccctgagggccgaggacaccgccgtgtactactgtgccagggcctgggcctacgactacggcgactacgagtactacttcggcatggacgtgtggggccagggcaccaccgtgacagtgtcttcc

SEQ ID NO: 525 - protein, 502 aa, Artificial Sequence
  PSMA-C  LH x I2C HL
DIQMTQSPSSLSASVGDRVTITCRASQGISHYLAWFQQKPGKAPKSLIYAASSLQSGVPSKFSGSGSGTDFTLTISSLQPEDFATYYCQQYNSFPLTFGGGTKVEIKGGGGSGGGGSGGGGSQVQLVESGGGVVQPGRSLRLSCAASGFTFSSYGMHWVRQAPGKGLDWVAIIWHDGSNKYYADSVKGRFTISRDNSKKTLYLQMNSLRAEDTAVYYCARAWAYDYGDYEYYFGMDVWGQGTTVTVSSGGGGSEVQLVESGGGLVQPGGSLKLSCAASGFTFNKYAMNWVRQAPGKGLEWVARIRSKYNNYATYYADSVKDRFTISRDDSKNTAYLQMNNLKTEDTAVYYCVRHGNFGNSYISYWAYWGQGTLVTVSSGGGGSGGGGSGGGGSQTVVTQEPSLTVSPGGTVTLTCGSSTGAVTSGNYPNWVQQKPGQAPRGLIGGTKFLAPGTPARFSGSLLGGKAALTLSGVQPEDEAEYYCVLWYSNRWVFGGGTKLTVL

SEQ ID NO: 526 - DNA, 1506 bp, Artificial Sequence
  PSMA-C  LH x I2C HL
gacatccagatgacccagtctccctcctccctgtctgcctccgtgggcgacagagtgaccatcacctgccgggcctcccagggcatctctcactacctggcctggttccagcagaagcctggcaaggcccctaagtccctgatctacgccgcctcctctctgcagtccggcgtgccttccaagttctccggctccggctctggcaccgacttcaccctgaccatctccagcctgcagcctgaggacttcgccacctactactgccagcagtacaactccttccctctgaccttcggcggagggaccaaggtggagatcaagggcggagggggctctggcggcggaggaagtggagggggcggatctcaggtgcagctggtcgagtctggcggaggggtggtgcagcctggccggtccctgagactgtcttgtgccgcctccggcttcaccttctcctcttacggcatgcactgggtgcgccaggctccaggcaagggactggactgggtggccatcatctggcacgacggctccaacaagtactacgccgactccgtgaagggccggttcaccatctcccgggacaactccaagaaaaccctgtacctgcagatgaactccctgagggccgaggacaccgccgtgtactactgtgccagggcctgggcctacgactacggcgactacgagtactacttcggcatggacgtgtggggccagggcaccaccgtgacagtgtcttccggaggtggtggatccgaggtgcagctggtcgagtctggaggaggattggtgcagcctggagggtcattgaaactctcatgtgcagcctctggattcaccttcaataagtacgccatgaactgggtccgccaggctccaggaaagggtttggaatgggttgctcgcataagaagtaaatataataattatgcaacatattatgccgattcagtgaaagacaggttcaccatctccagagatgattcaaaaaacactgcctatctacaaatgaacaacttgaaaactgaggacactgccgtgtactactgtgtgagacatgggaacttcggtaatagctacatatcctactgggcttactggggccaagggactctggtcaccgtctcctcaggtggtggtggttctggcggcggcggctccggtggtggtggttctcagactgttgtgactcaggaaccttcactcaccgtatcacctggtggaacagtcacactcacttgtggctcctcgactggggctgttacatctggcaactacccaaactgggtccaacaaaaaccaggtcaggcaccccgtggtctaataggtgggactaagttcctcgcccccggtactcctgccagattctcaggctccctgcttggaggcaaggctgccctcaccctctcaggggtacagccagaggatgaggcagaatattactgtgttctatggtacagcaaccgctgggtgttcggtggaggaaccaaactgactgtccta

SEQ ID NO: 527 - protein, 108 aa, Artificial Sequence
  PSMA-D VL
GIVMTQSPATLSVSPGERATLSCRTSQSIGWNLAWYQQKPGQAPRLLIYGASSRTTGIPARFSGSGSGTEFTLTISSLQSEDSAVYYCQHYDNWPMCSFGQGTELEIK

SEQ ID NO: 528 - DNA, 324 bp, Artificial Sequence
  PSMA-D VL
ggcatcgtgatgacccagtcccccgccaccctgtctgtgtctcccggcgagagagccaccctgagctgccggacctcccagtccatcggctggaacctggcctggtatcagcagaagcctggacaggcccctagactgctgatctacggcgcctcctccagaaccaccggcatccctgccaggttctccggctctggctccggcaccgagttcaccctgaccatctccagcctgcagtccgaggactccgccgtgtactactgccagcactacgacaactggcctatgtgctccttcggccagggcaccgagctggaaatcaag

SEQ ID NO: 529 - protein, 11 aa, Artificial Sequence
  PSMA-D LCDR1
RTSQSIGWNLA

SEQ ID NO: 530 - protein, 7 aa, Artificial Sequence
  PSMA-D LCDR2
GASSRTT

SEQ ID NO: 531 - protein, 10 aa, Artificial Sequence
  PSMA-D LCDR3
QHYDNWPMCS

SEQ ID NO: 532 - protein, 119 aa, Artificial Sequence
  PSMA-D VH
EVQLVQSGAEVKKPGESLKISCKGSGYSFTSYWIGWVRQMPGKGLEWMGIIYPGDSDTRYSPSFQGQVTISADKSISTAYLQWSSLKASDTAMYYCARRMAAAGPFDYWGQGTLVTVSS

SEQ ID NO: 533 - DNA, 357 bp, Artificial Sequence
  PSMA-D VH
gaagtgcagctggtgcagtctggcgccgaagtgaagaagcccggcgagtccctgaagatctcctgcaagggctccggctactccttcacctcctactggatcggctgggtgcgccagatgcctggcaagggcctggaatggatgggcatcatctaccctggcgactccgacacccggtactctcccagcttccagggccaggtgaccatctctgccgacaagtccatctccaccgcctacctgcagtggtcctccctgaaggcctccgacaccgccatgtactattgcgccaggcggatggccgctgccggcccttttgattactggggccagggaaccctggtgaccgtgtcctcc

SEQ ID NO: 534 - protein, 5 aa, Artificial Sequence
  PSMA-D HCDR1
SYWIG

SEQ ID NO: 535 - protein, 17 aa, Artificial Sequence
  PSMA-D HCDR2
IIYPGDSDTRYSPSFQG

SEQ ID NO: 536 - protein, 10 aa, Artificial Sequence
  PSMA-D HCDR3
RMAAAGPFDY

SEQ ID NO: 537 - protein, 242 aa, Artificial Sequence
  PSMA-D LH
GIVMTQSPATLSVSPGERATLSCRTSQSIGWNLAWYQQKPGQAPRLLIYGASSRTTGIPARFSGSGSGTEFTLTISSLQSEDSAVYYCQHYDNWPMCSFGQGTELEIKGGGGSGGGGSGGGGSEVQLVQSGAEVKKPGESLKISCKGSGYSFTSYWIGWVRQMPGKGLEWMGIIYPGDSDTRYSPSFQGQVTISADKSISTAYLQWSSLKASDTAMYYCARRMAAAGPFDYWGQGTLVTVSS

SEQ ID NO: 538 - DNA, 726 bp, Artificial Sequence
  PSMA-D LH
ggcatcgtgatgacccagtcccccgccaccctgtctgtgtctcccggcgagagagccaccctgagctgccggacctcccagtccatcggctggaacctggcctggtatcagcagaagcctggacaggcccctagactgctgatctacggcgcctcctccagaaccaccggcatccctgccaggttctccggctctggctccggcaccgagttcaccctgaccatctccagcctgcagtccgaggactccgccgtgtactactgccagcactacgacaactggcctatgtgctccttcggccagggcaccgagctggaaatcaagggcggagggggatctggcggcggaggaagtggagggggcggatccgaagtgcagctggtgcagtctggcgccgaagtgaagaagcccggcgagtccctgaagatctcctgcaagggctccggctactccttcacctcctactggatcggctgggtgcgccagatgcctggcaagggcctggaatggatgggcatcatctaccctggcgactccgacacccggtactctcccagcttccagggccaggtgaccatctctgccgacaagtccatctccaccgcctacctgcagtggtcctccctgaaggcctccgacaccgccatgtactattgcgccaggcggatggccgctgccggcccttttgattactggggccagggaaccctggtgaccgtgtcctcc

SEQ ID NO: 539 - protein, 496 aa, Artificial Sequence
  PSMA-D  LH x I2C HL
GIVMTQSPATLSVSPGERATLSCRTSQSIGWNLAWYQQKPGQAPRLLIYGASSRTTGIPARFSGSGSGTEFTLTISSLQSEDSAVYYCQHYDNWPMCSFGQGTELEIKGGGGSGGGGSGGGGSEVQLVQSGAEVKKPGESLKISCKGSGYSFTSYWIGWVRQMPGKGLEWMGIIYPGDSDTRYSPSFQGQVTISADKSISTAYLQWSSLKASDTAMYYCARRMAAAGPFDYWGQGTLVTVSSGGGGSEVQLVESGGGLVQPGGSLKLSCAASGFTFNKYAMNWVRQAPGKGLEWVARIRSKYNNYATYYADSVKDRFTISRDDSKNTAYLQMNNLKTEDTAVYYCVRHGNFGNSYISYWAYWGQGTLVTVSSGGGGSGGGGSGGGGSQTVVTQEPSLTVSPGGTVTLTCGSSTGAVTSGNYPNWVQQKPGQAPRGLIGGTKFLAPGTPARFSGSLLGGKAALTLSGVQPEDEAEYYCVLWYSNRWVFGGGTKLTVL

SEQ ID NO: 540 - DNA, 1488 bp, Artificial Sequence
  PSMA-D  LH x I2C HL
ggcatcgtgatgacccagtcccccgccaccctgtctgtgtctcccggcgagagagccaccctgagctgccggacctcccagtccatcggctggaacctggcctggtatcagcagaagcctggacaggcccctagactgctgatctacggcgcctcctccagaaccaccggcatccctgccaggttctccggctctggctccggcaccgagttcaccctgaccatctccagcctgcagtccgaggactccgccgtgtactactgccagcactacgacaactggcctatgtgctccttcggccagggcaccgagctggaaatcaagggcggagggggatctggcggcggaggaagtggagggggcggatccgaagtgcagctggtgcagtctggcgccgaagtgaagaagcccggcgagtccctgaagatctcctgcaagggctccggctactccttcacctcctactggatcggctgggtgcgccagatgcctggcaagggcctggaatggatgggcatcatctaccctggcgactccgacacccggtactctcccagcttccagggccaggtgaccatctctgccgacaagtccatctccaccgcctacctgcagtggtcctccctgaaggcctccgacaccgccatgtactattgcgccaggcggatggccgctgccggcccttttgattactggggccagggaaccctggtgaccgtgtcctccggaggtggtggatccgaggtgcagctggtcgagtctggaggaggattggtgcagcctggagggtcattgaaactctcatgtgcagcctctggattcaccttcaataagtacgccatgaactgggtccgccaggctccaggaaagggtttggaatgggttgctcgcataagaagtaaatataataattatgcaacatattatgccgattcagtgaaagacaggttcaccatctccagagatgattcaaaaaacactgcctatctacaaatgaacaacttgaaaactgaggacactgccgtgtactactgtgtgagacatgggaacttcggtaatagctacatatcctactgggcttactggggccaagggactctggtcaccgtctcctcaggtggtggtggttctggcggcggcggctccggtggtggtggttctcagactgttgtgactcaggaaccttcactcaccgtatcacctggtggaacagtcacactcacttgtggctcctcgactggggctgttacatctggcaactacccaaactgggtccaacaaaaaccaggtcaggcaccccgtggtctaataggtgggactaagttcctcgcccccggtactcctgccagattctcaggctccctgcttggaggcaaggctgccctcaccctctcaggggtacagccagaggatgaggcagaatattactgtgttctatggtacagcaaccgctgggtgttcggtggaggaaccaaactgactgtccta

SEQ ID NO: 541 - protein, 112 aa, Artificial Sequence
  PSMA-E VL
DIVMTQTPLSLSVTPGQPASISCKSSQSLLHSDGKTFLYWYLQKPGQPPQLLIYEVSNRFSGVPDRFSGSGSGTDFTLKISRVEAEDVGLYYCMQSIQLPLTFGGGTKVEIK

SEQ ID NO: 542 - DNA, 336 bp, Artificial Sequence
  PSMA-E VL
gacatcgtgatgacccagacccctctgtccctgtctgtgacccctggccagcctgcctccatctcctgcaagtcctcccagtccctgctgcactccgacggcaagaccttcctgtactggtatctgcagaagcccggccagcctcctcagctgctgatctacgaggtgtccaaccggttctccggcgtgcctgacaggttctctggctccggctccggcaccgacttcaccctgaagatctcccgggtggaggctgaggacgtgggcctgtactactgcatgcagtccatccagctgcctctgaccttcggcggagggaccaaggtggagatcaag

SEQ ID NO: 543 - protein, 16 aa, Artificial Sequence
  PSMA-E LCDR1
KSSQSLLHSDGKTFLY

SEQ ID NO: 544 - protein, 7 aa, Artificial Sequence
  PSMA-E LCDR2
EVSNRFS

SEQ ID NO: 545 - protein, 9 aa, Artificial Sequence
  PSMA-E LCDR3
MQSIQLPLT

SEQ ID NO: 546 - protein, 125 aa, Artificial Sequence
  PSMA-E VH
QVQLVESGGGVVQPGRSLRLSCAASGFTFISYGMHWVRQAPGKGLEWVAVISYDGSNKYYADSVKGRFTISRDNSKNTLYLQMNSLRAEDTAVYYCARVLVGALYYYNYYGMDVWGQGTTVTVSS

SEQ ID NO: 547 - DNA, 375 bp, Artificial Sequence
  PSMA-E VH
caggtgcagctggtcgagtctgggggaggggtcgtgcagcctggccggtccctgagactgtcttgcgccgcctccggcttcaccttcatctcttacggcatgcactgggtgcgccaggctccaggcaagggactggaatgggtggccgtgatctcctacgacggctccaacaagtactacgccgactccgtgaagggccggttcaccatctcccgggacaactccaagaacaccctgtacctgcagatgaactccctgagggccgaggacaccgccgtgtactactgtgccagggtgctggtcggcgctctgtactactacaactactacggcatggacgtgtggggccagggcaccaccgtgacagtgtcttcc

SEQ ID NO: 548 - protein, 5 aa, Artificial Sequence
  PSMA-E HCDR1
SYGMH

SEQ ID NO: 549 - protein, 17 aa, Artificial Sequence
  PSMA-E HCDR2
VISYDGSNKYYADSVKG

SEQ ID NO: 550 - protein, 16 aa, Artificial Sequence
  PSMA-E HCDR3
VLVGALYYYNYYGMDV

SEQ ID NO: 551 - protein, 252 aa, Artificial Sequence
  PSMA-E LH
DIVMTQTPLSLSVTPGQPASISCKSSQSLLHSDGKTFLYWYLQKPGQPPQLLIYEVSNRFSGVPDRFSGSGSGTDFTLKISRVEAEDVGLYYCMQSIQLPLTFGGGTKVEIKGGGGSGGGGSGGGGSQVQLVESGGGVVQPGRSLRLSCAASGFTFISYGMHWVRQAPGKGLEWVAVISYDGSNKYYADSVKGRFTISRDNSKNTLYLQMNSLRAEDTAVYYCARVLVGALYYYNYYGMDVWGQGTTVTVSS

SEQ ID NO: 552 - DNA, 756 bp, Artificial Sequence
  PSMA-E LH
gacatcgtgatgacccagacccctctgtccctgtctgtgacccctggccagcctgcctccatctcctgcaagtcctcccagtccctgctgcactccgacggcaagaccttcctgtactggtatctgcagaagcccggccagcctcctcagctgctgatctacgaggtgtccaaccggttctccggcgtgcctgacaggttctctggctccggctccggcaccgacttcaccctgaagatctcccgggtggaggctgaggacgtgggcctgtactactgcatgcagtccatccagctgcctctgaccttcggcggagggaccaaggtggagatcaagggcggagggggctctggcggcggaggaagtggagggggcggatctcaggtgcagctggtcgagtctgggggaggggtcgtgcagcctggccggtccctgagactgtcttgcgccgcctccggcttcaccttcatctcttacggcatgcactgggtgcgccaggctccaggcaagggactggaatgggtggccgtgatctcctacgacggctccaacaagtactacgccgactccgtgaagggccggttcaccatctcccgggacaactccaagaacaccctgtacctgcagatgaactccctgagggccgaggacaccgccgtgtactactgtgccagggtgctggtcggcgctctgtactactacaactactacggcatggacgtgtggggccagggcaccaccgtgacagtgtcttcc

SEQ ID NO: 553 - protein, 506 aa, Artificial Sequence
  PSMA-E  LH x I2C HL
DIVMTQTPLSLSVTPGQPASISCKSSQSLLHSDGKTFLYWYLQKPGQPPQLLIYEVSNRFSGVPDRFSGSGSGTDFTLKISRVEAEDVGLYYCMQSIQLPLTFGGGTKVEIKGGGGSGGGGSGGGGSQVQLVESGGGVVQPGRSLRLSCAASGFTFISYGMHWVRQAPGKGLEWVAVISYDGSNKYYADSVKGRFTISRDNSKNTLYLQMNSLRAEDTAVYYCARVLVGALYYYNYYGMDVWGQGTTVTVSSGGGGSEVQLVESGGGLVQPGGSLKLSCAASGFTFNKYAMNWVRQAPGKGLEWVARIRSKYNNYATYYADSVKDRFTISRDDSKNTAYLQMNNLKTEDTAVYYCVRHGNFGNSYISYWAYWGQGTLVTVSSGGGGSGGGGSGGGGSQTVVTQEPSLTVSPGGTVTLTCGSSTGAVTSGNYPNWVQQKPGQAPRGLIGGTKFLAPGTPARFSGSLLGGKAALTLSGVQPEDEAEYYCVLWYSNRWVFGGGTKLTVL

SEQ ID NO: 554 - DNA, 1518 bp, Artificial Sequence
  PSMA-E  LH x I2C HL
gacatcgtgatgacccagacccctctgtccctgtctgtgacccctggccagcctgcctccatctcctgcaagtcctcccagtccctgctgcactccgacggcaagaccttcctgtactggtatctgcagaagcccggccagcctcctcagctgctgatctacgaggtgtccaaccggttctccggcgtgcctgacaggttctctggctccggctccggcaccgacttcaccctgaagatctcccgggtggaggctgaggacgtgggcctgtactactgcatgcagtccatccagctgcctctgaccttcggcggagggaccaaggtggagatcaagggcggagggggctctggcggcggaggaagtggagggggcggatctcaggtgcagctggtcgagtctgggggaggggtcgtgcagcctggccggtccctgagactgtcttgcgccgcctccggcttcaccttcatctcttacggcatgcactgggtgcgccaggctccaggcaagggactggaatgggtggccgtgatctcctacgacggctccaacaagtactacgccgactccgtgaagggccggttcaccatctcccgggacaactccaagaacaccctgtacctgcagatgaactccctgagggccgaggacaccgccgtgtactactgtgccagggtgctggtcggcgctctgtactactacaactactacggcatggacgtgtggggccagggcaccaccgtgacagtgtcttccggaggtggtggatccgaggtgcagctggtcgagtctggaggaggattggtgcagcctggagggtcattgaaactctcatgtgcagcctctggattcaccttcaataagtacgccatgaactgggtccgccaggctccaggaaagggtttggaatgggttgctcgcataagaagtaaatataataattatgcaacatattatgccgattcagtgaaagacaggttcaccatctccagagatgattcaaaaaacactgcctatctacaaatgaacaacttgaaaactgaggacactgccgtgtactactgtgtgagacatgggaacttcggtaatagctacatatcctactgggcttactggggccaagggactctggtcaccgtctcctcaggtggtggtggttctggcggcggcggctccggtggtggtggttctcagactgttgtgactcaggaaccttcactcaccgtatcacctggtggaacagtcacactcacttgtggctcctcgactggggctgttacatctggcaactacccaaactgggtccaacaaaaaccaggtcaggcaccccgtggtctaataggtgggactaagttcctcgcccccggtactcctgccagattctcaggctccctgcttggaggcaaggctgccctcaccctctcaggggtacagccagaggatgaggcagaatattactgtgttctatggtacagcaaccgctgggtgttcggtggaggaaccaaactgactgtccta

SEQ ID NO: 555 - protein, 107 aa, Artificial Sequence
  PSMA-F VL
AIQLTQSPSSLSASVGDRVTITCRASQGISSALAWYQQKSGKAPKLLIFDASSLESGVPSRFSGSGSGTDFTLTISSLQPEDFATYYCQQFNSYPLTFGGGTKVEIK

SEQ ID NO: 556 - DNA, 321 bp, Artificial Sequence
  PSMA-F VL
gccatccagctgacccagagtccctcctccctgtctgcctccgtgggcgacagagtgaccatcacctgccgggcctcccagggcatctcttccgccctggcctggtatcagcagaagtccggcaaggcccctaagctgctgatcttcgacgcctcctctctggaatccggcgtgccttcccggttctccggctctggctccggcaccgacttcaccctgaccatctccagcctgcagcctgaggacttcgccacctactactgccagcagttcaactcctaccctctgaccttcggcggagggaccaaggtggagatcaag

SEQ ID NO: 557 - protein, 11 aa, Artificial Sequence
  PSMA-F LCDR1
RASQGISSALA

SEQ ID NO: 558 - protein, 7 aa, Artificial Sequence
  PSMA-F LCDR2
DASSLES

SEQ ID NO: 559 - protein, 9 aa, Artificial Sequence
  PSMA-F LCDR3
QQFNSYPLT

SEQ ID NO: 560 - protein, 124 aa, Artificial Sequence
  PSMA-F VH
QVQLVESGGGVVQPGRSLRLSCAASGFTFSSYAMHWVRQAPGKGLEWVAVISYDGNNKYYADSVKGRFTISRDNSKNTLYLQMNSLRAEDTAVYYCARAVPWGSRYYYYGMDVWGQGTTVTVSS

SEQ ID NO: 561 - DNA, 372 bp, Artificial Sequence
  PSMA-F VH
caggtgcagctggtcgagtctgggggaggggtcgtgcagcctggccggtccctgagactgtcttgcgccgcctccggcttcaccttctcctcttacgccatgcactgggtgcgccaggctccaggcaagggactggaatgggtggccgtgatctcctacgacggcaacaacaagtactacgccgactccgtgaagggccggttcaccatctcccgggacaactccaagaacaccctgtacctgcagatgaactccctgagggctgaggacaccgccgtgtactactgcgccagagccgtgccttggggctcccggtactactactacggcatggacgtgtggggccagggcaccaccgtgacagtgtcttcc

SEQ ID NO: 562 - protein, 5 aa, Artificial Sequence
  PSMA-F HCDR1
SYAMH

SEQ ID NO: 563 - protein, 17 aa, Artificial Sequence
  PSMA-F HCDR2
VISYDGNNKYYADSVKG

SEQ ID NO: 564 - protein, 15 aa, Artificial Sequence
  PSMA-F HCDR3
AVPWGSRYYYYGMDV

SEQ ID NO: 565 - protein, 246 aa, Artificial Sequence
  PSMA-F LH
AIQLTQSPSSLSASVGDRVTITCRASQGISSALAWYQQKSGKAPKLLIFDASSLESGVPSRFSGSGSGTDFTLTISSLQPEDFATYYCQQFNSYPLTFGGGTKVEIKGGGGSGGGGSGGGGSQVQLVESGGGVVQPGRSLRLSCAASGFTFSSYAMHWVRQAPGKGLEWVAVISYDGNNKYYADSVKGRFTISRDNSKNTLYLQMNSLRAEDTAVYYCARAVPWGSRYYYYGMDVWGQGTTVTVSS

SEQ ID NO: 566 - DNA, 738 bp, Artificial Sequence
  PSMA-F LH
gccatccagctgacccagagtccctcctccctgtctgcctccgtgggcgacagagtgaccatcacctgccgggcctcccagggcatctcttccgccctggcctggtatcagcagaagtccggcaaggcccctaagctgctgatcttcgacgcctcctctctggaatccggcgtgccttcccggttctccggctctggctccggcaccgacttcaccctgaccatctccagcctgcagcctgaggacttcgccacctactactgccagcagttcaactcctaccctctgaccttcggcggagggaccaaggtggagatcaagggcggagggggctctggcggcggaggaagtggagggggcggatctcaggtgcagctggtcgagtctgggggaggggtcgtgcagcctggccggtccctgagactgtcttgcgccgcctccggcttcaccttctcctcttacgccatgcactgggtgcgccaggctccaggcaagggactggaatgggtggccgtgatctcctacgacggcaacaacaagtactacgccgactccgtgaagggccggttcaccatctcccgggacaactccaagaacaccctgtacctgcagatgaactccctgagggctgaggacaccgccgtgtactactgcgccagagccgtgccttggggctcccggtactactactacggcatggacgtgtggggccagggcaccaccgtgacagtgtcttcc

SEQ ID NO: 567 - protein, 500 aa, Artificial Sequence
  PSMA-F  LH x I2C HL
AIQLTQSPSSLSASVGDRVTITCRASQGISSALAWYQQKSGKAPKLLIFDASSLESGVPSRFSGSGSGTDFTLTISSLQPEDFATYYCQQFNSYPLTFGGGTKVEIKGGGGSGGGGSGGGGSQVQLVESGGGVVQPGRSLRLSCAASGFTFSSYAMHWVRQAPGKGLEWVAVISYDGNNKYYADSVKGRFTISRDNSKNTLYLQMNSLRAEDTAVYYCARAVPWGSRYYYYGMDVWGQGTTVTVSSGGGGSEVQLVESGGGLVQPGGSLKLSCAASGFTFNKYAMNWVRQAPGKGLEWVARIRSKYNNYATYYADSVKDRFTISRDDSKNTAYLQMNNLKTEDTAVYYCVRHGNFGNSYISYWAYWGQGTLVTVSSGGGGSGGGGSGGGGSQTVVTQEPSLTVSPGGTVTLTCGSSTGAVTSGNYPNWVQQKPGQAPRGLIGGTKFLAPGTPARFSGSLLGGKAALTLSGVQPEDEAEYYCVLWYSNRWVFGGGTKLTVL

SEQ ID NO: 568 - DNA, 1500 bp, Artificial Sequence
  PSMA-F  LH x I2C HL
gccatccagctgacccagagtccctcctccctgtctgcctccgtgggcgacagagtgaccatcacctgccgggcctcccagggcatctcttccgccctggcctggtatcagcagaagtccggcaaggcccctaagctgctgatcttcgacgcctcctctctggaatccggcgtgccttcccggttctccggctctggctccggcaccgacttcaccctgaccatctccagcctgcagcctgaggacttcgccacctactactgccagcagttcaactcctaccctctgaccttcggcggagggaccaaggtggagatcaagggcggagggggctctggcggcggaggaagtggagggggcggatctcaggtgcagctggtcgagtctgggggaggggtcgtgcagcctggccggtccctgagactgtcttgcgccgcctccggcttcaccttctcctcttacgccatgcactgggtgcgccaggctccaggcaagggactggaatgggtggccgtgatctcctacgacggcaacaacaagtactacgccgactccgtgaagggccggttcaccatctcccgggacaactccaagaacaccctgtacctgcagatgaactccctgagggctgaggacaccgccgtgtactactgcgccagagccgtgccttggggctcccggtactactactacggcatggacgtgtggggccagggcaccaccgtgacagtgtcttccggaggtggtggatccgaggtgcagctggtcgagtctggaggaggattggtgcagcctggagggtcattgaaactctcatgtgcagcctctggattcaccttcaataagtacgccatgaactgggtccgccaggctccaggaaagggtttggaatgggttgctcgcataagaagtaaatataataattatgcaacatattatgccgattcagtgaaagacaggttcaccatctccagagatgattcaaaaaacactgcctatctacaaatgaacaacttgaaaactgaggacactgccgtgtactactgtgtgagacatgggaacttcggtaatagctacatatcctactgggcttactggggccaagggactctggtcaccgtctcctcaggtggtggtggttctggcggcggcggctccggtggtggtggttctcagactgttgtgactcaggaaccttcactcaccgtatcacctggtggaacagtcacactcacttgtggctcctcgactggggctgttacatctggcaactacccaaactgggtccaacaaaaaccaggtcaggcaccccgtggtctaataggtgggactaagttcctcgcccccggtactcctgccagattctcaggctccctgcttggaggcaaggctgccctcaccctctcaggggtacagccagaggatgaggcagaatattactgtgttctatggtacagcaaccgctgggtgttcggtggaggaaccaaactgactgtccta

SEQ ID NO: 569 - protein, 108 aa, Artificial Sequence
  PSMA-J VL
EIVLTQSPATLSLSPGERATLSCRASQSVSSYLAWFQQKPGQAPRLLIYDASNRATGIPARFSGSGSGTDFTLTISSLEPEDFAVYYCQQRSNWLMYTFGQGTKLEIK

SEQ ID NO: 570 - DNA, 324 bp, Artificial Sequence
  PSMA-J VL
gagatcgtgctgacccagtcccctgccaccctgtctctgtctcccggcgagagagccaccctgagctgccgggcctcccagtccgtgtcctcctacctggcctggttccagcagaagcctggacaggcccctaggctgctgatctacgacgcctccaacagggctaccggcatccctgcccggttctccggctctggctccggcaccgacttcaccctgaccatctccagcctggaacctgaggacttcgccgtgtactactgccagcagcggtccaactggctgatgtataccttcggccagggcaccaagctggaaatcaag

SEQ ID NO: 571 - protein, 11 aa, Artificial Sequence
  PSMA-J LCDR1
RASQSVSSYLA

SEQ ID NO: 572 - protein, 7 aa, Artificial Sequence
  PSMA-J LCDR2
DASNRAT

SEQ ID NO: 573 - protein, 10 aa, Artificial Sequence
  PSMA-J LCDR3
QQRSNWLMYT

SEQ ID NO: 574 - protein, 119 aa, Artificial Sequence
  PSMA-J VH
EVQLVQSGAEVKKPGESLKISCKGSGYSFTSYWIGWARQMPGKGLEWMGIIYPGDSDTRYSPSFQGQVTISADKSISTAYLQWSSLKASDTAMYYCSAANSSHWYFDLWGRGTLVTVSS

SEQ ID NO: 575 - DNA, 357 bp, Artificial Sequence
  PSMA-J VH
gaagtgcagctggtgcagtctggcgccgaagtgaagaagcccggcgagtccctgaagatctcctgcaagggctccgggtactccttcacctcctactggatcggctgggccaggcagatgccaggcaagggcctggaatggatgggcatcatctaccctggcgactccgacacccggtactctcccagcttccagggccaggtgaccatctctgccgacaagtccatctccaccgcctacctgcagtggtcctccctgaaggcctccgacaccgccatgtactattgctccgccgccaactcctcccactggtacttcgacctgtggggcagaggcaccctggtgaccgtgtcttcc

SEQ ID NO: 576 - protein, 5 aa, Artificial Sequence
  PSMA-J HCDR1
SYWIG

SEQ ID NO: 577 - protein, 17 aa, Artificial Sequence
  PSMA-J HCDR2
IIYPGDSDTRYSPSFQG

SEQ ID NO: 578 - protein, 10 aa, Artificial Sequence
  PSMA-J HCDR3
ANSSHWYFDL

SEQ ID NO: 579 - protein, 242 aa, Artificial Sequence
  PSMA-J LH
EIVLTQSPATLSLSPGERATLSCRASQSVSSYLAWFQQKPGQAPRLLIYDASNRATGIPARFSGSGSGTDFTLTISSLEPEDFAVYYCQQRSNWLMYTFGQGTKLEIKGGGGSGGGGSGGGGSEVQLVQSGAEVKKPGESLKISCKGSGYSFTSYWIGWARQMPGKGLEWMGIIYPGDSDTRYSPSFQGQVTISADKSISTAYLQWSSLKASDTAMYYCSAANSSHWYFDLWGRGTLVTVSS

SEQ ID NO: 580 - DNA, 726 bp, Artificial Sequence
  PSMA-J LH
gagatcgtgctgacccagtcccctgccaccctgtctctgtctcccggcgagagagccaccctgagctgccgggcctcccagtccgtgtcctcctacctggcctggttccagcagaagcctggacaggcccctaggctgctgatctacgacgcctccaacagggctaccggcatccctgcccggttctccggctctggctccggcaccgacttcaccctgaccatctccagcctggaacctgaggacttcgccgtgtactactgccagcagcggtccaactggctgatgtataccttcggccagggcaccaagctggaaatcaagggcggagggggatctgggggcggaggaagtggagggggcggatccgaagtgcagctggtgcagtctggcgccgaagtgaagaagcccggcgagtccctgaagatctcctgcaagggctccgggtactccttcacctcctactggatcggctgggccaggcagatgccaggcaagggcctggaatggatgggcatcatctaccctggcgactccgacacccggtactctcccagcttccagggccaggtgaccatctctgccgacaagtccatctccaccgcctacctgcagtggtcctccctgaaggcctccgacaccgccatgtactattgctccgccgccaactcctcccactggtacttcgacctgtggggcagaggcaccctggtgaccgtgtcttcc

SEQ ID NO: 581 - protein, 496 aa, Artificial Sequence
  PSMA-J  LH x I2C HL
EIVLTQSPATLSLSPGERATLSCRASQSVSSYLAWFQQKPGQAPRLLIYDASNRATGIPARFSGSGSGTDFTLTISSLEPEDFAVYYCQQRSNWLMYTFGQGTKLEIKGGGGSGGGGSGGGGSEVQLVQSGAEVKKPGESLKISCKGSGYSFTSYWIGWARQMPGKGLEWMGIIYPGDSDTRYSPSFQGQVTISADKSISTAYLQWSSLKASDTAMYYCSAANSSHWYFDLWGRGTLVTVSSGGGGSEVQLVESGGGLVQPGGSLKLSCAASGFTFNKYAMNWVRQAPGKGLEWVARIRSKYNNYATYYADSVKDRFTISRDDSKNTAYLQMNNLKTEDTAVYYCVRHGNFGNSYISYWAYWGQGTLVTVSSGGGGSGGGGSGGGGSQTVVTQEPSLTVSPGGTVTLTCGSSTGAVTSGNYPNWVQQKPGQAPRGLIGGTKFLAPGTPARFSGSLLGGKAALTLSGVQPEDEAEYYCVLWYSNRWVFGGGTKLTVL

SEQ ID NO: 582 - DNA, 1488 bp, Artificial Sequence
  PSMA-J  LH x I2C HL
gagatcgtgctgacccagtcccctgccaccctgtctctgtctcccggcgagagagccaccctgagctgccgggcctcccagtccgtgtcctcctacctggcctggttccagcagaagcctggacaggcccctaggctgctgatctacgacgcctccaacagggctaccggcatccctgcccggttctccggctctggctccggcaccgacttcaccctgaccatctccagcctggaacctgaggacttcgccgtgtactactgccagcagcggtccaactggctgatgtataccttcggccagggcaccaagctggaaatcaagggcggagggggatctgggggcggaggaagtggagggggcggatccgaagtgcagctggtgcagtctggcgccgaagtgaagaagcccggcgagtccctgaagatctcctgcaagggctccgggtactccttcacctcctactggatcggctgggccaggcagatgccaggcaagggcctggaatggatgggcatcatctaccctggcgactccgacacccggtactctcccagcttccagggccaggtgaccatctctgccgacaagtccatctccaccgcctacctgcagtggtcctccctgaaggcctccgacaccgccatgtactattgctccgccgccaactcctcccactggtacttcgacctgtggggcagaggcaccctggtgaccgtgtcttccggaggtggtggatccgaggtgcagctggtcgagtctggaggaggattggtgcagcctggagggtcattgaaactctcatgtgcagcctctggattcaccttcaataagtacgccatgaactgggtccgccaggctccaggaaagggtttggaatgggttgctcgcataagaagtaaatataataattatgcaacatattatgccgattcagtgaaagacaggttcaccatctccagagatgattcaaaaaacactgcctatctacaaatgaacaacttgaaaactgaggacactgccgtgtactactgtgtgagacatgggaacttcggtaatagctacatatcctactgggcttactggggccaagggactctggtcaccgtctcctcaggtggtggtggttctggcggcggcggctccggtggtggtggttctcagactgttgtgactcaggaaccttcactcaccgtatcacctggtggaacagtcacactcacttgtggctcctcgactggggctgttacatctggcaactacccaaactgggtccaacaaaaaccaggtcaggcaccccgtggtctaataggtgggactaagttcctcgcccccggtactcctgccagattctcaggctccctgcttggaggcaaggctgccctcaccctctcaggggtacagccagaggatgaggcagaatattactgtgttctatggtacagcaaccgctgggtgttcggtggaggaaccaaactgactgtccta

SEQ ID NO: 583 - protein, 108 aa, Artificial Sequence
  PSMA-L VL
EIVLTQSPATLSLSPGERATLSCRASQSVSSYLAWYQQKPGQAPRLLIYDASNRATGIPARFSGSGSGTDFTLTISSLEPEDFAVYYCQQRSDWLMYTFGQGTKLEIK

SEQ ID NO: 584 - DNA, 324 bp, Artificial Sequence
  PSMA-L VL
gagatcgtgctgacccagtcccctgccaccctgtctctgtctcccggcgagagagccaccctgagctgccgggcctcccagtccgtgtcctcctacctggcctggtatcagcagaagcctggacaggcccctaggctgctgatctacgacgcctccaacagggctaccggcatccctgcccggttctccggctctggctccggcaccgacttcaccctgaccatctccagcctggaacctgaggacttcgccgtgtactactgccagcagcggtccgactggctgatgtataccttcggccagggcaccaagctggaaatcaag

SEQ ID NO: 585 - protein, 11 aa, Artificial Sequence
  PSMA-L LCDR1
RASQSVSSYLA

SEQ ID NO: 586 - protein, 7 aa, Artificial Sequence
  PSMA-L LCDR2
DASNRAT

SEQ ID NO: 587 - protein, 10 aa, Artificial Sequence
  PSMA-L LCDR3
QQRSDWLMYT

SEQ ID NO: 588 - protein, 119 aa, Artificial Sequence
  PSMA-L VH
EVQLVQSGAEVKTPGESLKISCKGSGYTFTSYWIGWVRQMPGKGPEWMGIIYPGDSDTRYSPSFQGQVTFSADKSISTAYLQWNSLKTSDTAMYYCATANPSYWYFDLWGRGTLVTVSS

SEQ ID NO: 589 - DNA, 357 bp, Artificial Sequence
  PSMA-L VH
gaagtgcagctggtgcagtctggcgccgaagtgaaaacccctggcgagtccctgaagatctcctgcaagggctccggctacaccttcacctcttactggatcggctgggtgcgccagatgcctggcaagggccctgagtggatgggcatcatctaccctggcgactccgacacccggtactctcccagcttccagggccaggtgaccttctccgccgacaagtccatctccaccgcctacctgcagtggaactccctgaaaacctccgacaccgccatgtactattgcgccaccgccaaccctagctactggtacttcgacctgtggggcagaggcaccctggtgaccgtgtcttcc

SEQ ID NO: 590 - protein, 5 aa, Artificial Sequence
  PSMA-L HCDR1
SYWIG

SEQ ID NO: 591 - protein, 17 aa, Artificial Sequence
  PSMA-L HCDR2
IIYPGDSDTRYSPSFQG

SEQ ID NO: 592 - protein, 10 aa, Artificial Sequence
  PSMA-L HCDR3
ANPSYWYFDL

SEQ ID NO: 593 - protein, 242 aa, Artificial Sequence
  PSMA-L LH
EIVLTQSPATLSLSPGERATLSCRASQSVSSYLAWYQQKPGQAPRLLIYDASNRATGIPARFSGSGSGTDFTLTISSLEPEDFAVYYCQQRSDWLMYTFGQGTKLEIKGGGGSGGGGSGGGGSEVQLVQSGAEVKTPGESLKISCKGSGYTFTSYWIGWVRQMPGKGPEWMGIIYPGDSDTRYSPSFQGQVTFSADKSISTAYLQWNSLKTSDTAMYYCATANPSYWYFDLWGRGTLVTVSS

SEQ ID NO: 594 - DNA, 726 bp, Artificial Sequence
  PSMA-L LH
gagatcgtgctgacccagtcccctgccaccctgtctctgtctcccggcgagagagccaccctgagctgccgggcctcccagtccgtgtcctcctacctggcctggtatcagcagaagcctggacaggcccctaggctgctgatctacgacgcctccaacagggctaccggcatccctgcccggttctccggctctggctccggcaccgacttcaccctgaccatctccagcctggaacctgaggacttcgccgtgtactactgccagcagcggtccgactggctgatgtataccttcggccagggcaccaagctggaaatcaagggcggagggggatctggcggcggaggaagtggagggggcggatccgaagtgcagctggtgcagtctggcgccgaagtgaaaacccctggcgagtccctgaagatctcctgcaagggctccggctacaccttcacctcttactggatcggctgggtgcgccagatgcctggcaagggccctgagtggatgggcatcatctaccctggcgactccgacacccggtactctcccagcttccagggccaggtgaccttctccgccgacaagtccatctccaccgcctacctgcagtggaactccctgaaaacctccgacaccgccatgtactattgcgccaccgccaaccctagctactggtacttcgacctgtggggcagaggcaccctggtgaccgtgtcttcc

SEQ ID NO: 595 - protein, 496 aa, Artificial Sequence
  PSMA-L  LH x I2C HL
EIVLTQSPATLSLSPGERATLSCRASQSVSSYLAWYQQKPGQAPRLLIYDASNRATGIPARFSGSGSGTDFTLTISSLEPEDFAVYYCQQRSDWLMYTFGQGTKLEIKGGGGSGGGGSGGGGSEVQLVQSGAEVKTPGESLKISCKGSGYTFTSYWIGWVRQMPGKGPEWMGIIYPGDSDTRYSPSFQGQVTFSADKSISTAYLQWNSLKTSDTAMYYCATANPSYWYFDLWGRGTLVTVSSGGGGSEVQLVESGGGLVQPGGSLKLSCAASGFTFNKYAMNWVRQAPGKGLEWVARIRSKYNNYATYYADSVKDRFTISRDDSKNTAYLQMNNLKTEDTAVYYCVRHGNFGNSYISYWAYWGQGTLVTVSSGGGGSGGGGSGGGGSQTVVTQEPSLTVSPGGTVTLTCGSSTGAVTSGNYPNWVQQKPGQAPRGLIGGTKFLAPGTPARFSGSLLGGKAALTLSGVQPEDEAEYYCVLWYSNRWVFGGGTKLTVL

SEQ ID NO: 596 - DNA, 1488 bp, Artificial Sequence
  PSMA-L  LH x I2C HL
gagatcgtgctgacccagtcccctgccaccctgtctctgtctcccggcgagagagccaccctgagctgccgggcctcccagtccgtgtcctcctacctggcctggtatcagcagaagcctggacaggcccctaggctgctgatctacgacgcctccaacagggctaccggcatccctgcccggttctccggctctggctccggcaccgacttcaccctgaccatctccagcctggaacctgaggacttcgccgtgtactactgccagcagcggtccgactggctgatgtataccttcggccagggcaccaagctggaaatcaagggcggagggggatctggcggcggaggaagtggagggggcggatccgaagtgcagctggtgcagtctggcgccgaagtgaaaacccctggcgagtccctgaagatctcctgcaagggctccggctacaccttcacctcttactggatcggctgggtgcgccagatgcctggcaagggccctgagtggatgggcatcatctaccctggcgactccgacacccggtactctcccagcttccagggccaggtgaccttctccgccgacaagtccatctccaccgcctacctgcagtggaactccctgaaaacctccgacaccgccatgtactattgcgccaccgccaaccctagctactggtacttcgacctgtggggcagaggcaccctggtgaccgtgtcttccggaggtggtggatccgaggtgcagctggtcgagtctggaggaggattggtgcagcctggagggtcattgaaactctcatgtgcagcctctggattcaccttcaataagtacgccatgaactgggtccgccaggctccaggaaagggtttggaatgggttgctcgcataagaagtaaatataataattatgcaacatattatgccgattcagtgaaagacaggttcaccatctccagagatgattcaaaaaacactgcctatctacaaatgaacaacttgaaaactgaggacactgccgtgtactactgtgtgagacatgggaacttcggtaatagctacatatcctactgggcttactggggccaagggactctggtcaccgtctcctcaggtggtggtggttctggcggcggcggctccggtggtggtggttctcagactgttgtgactcaggaaccttcactcaccgtatcacctggtggaacagtcacactcacttgtggctcctcgactggggctgttacatctggcaactacccaaactgggtccaacaaaaaccaggtcaggcaccccgtggtctaataggtgggactaagttcctcgcccccggtactcctgccagattctcaggctccctgcttggaggcaaggctgccctcaccctctcaggggtacagccagaggatgaggcagaatattactgtgttctatggtacagcaaccgctgggtgttcggtggaggaaccaaactgactgtccta

SEQ ID NO: 597 - protein, 107 aa, Artificial Sequence
  PM 99-A8 VL
DIQMTQSPSTLAASAGEKVTITCRASSSVTYMHWYQQKPGKAPKLLIYDTSKVASGVPSRFSGSGSGTAFTLTISSVQTDDFATYYCQQWSRNSPYTFGQGTKLEIK

SEQ ID NO: 598 - DNA, 321 bp, Artificial Sequence
  PM 99-A8 VL
gacatccagatgactcagtctccatcaaccctggctgcatctgcgggggagaaagtcaccatcacctgccgtgccagctccagtgtgacttacatgcactggtaccagcagaagccaggcaaagcccctaaattattgatttatgacacatccaaagtggcttctggagtcccaagtcgcttcagtggcagtgggtctgggaccgcatttactctcacaatcagctccgtgcagactgatgactttgccacttattactgtcagcagtggagtaggaactcaccctacacgtttggacaggggaccaagctggaaatcaaa

SEQ ID NO: 599 - protein, 10 aa, Artificial Sequence
  PM 99-A8 LCDR1
RASSSVTYMH

SEQ ID NO: 600 - protein, 7 aa, Artificial Sequence
  PM 99-A8 LCDR2
DTSKVAS

SEQ ID NO: 601 - protein, 10 aa, Artificial Sequence
  PM 99-A8 LCDR3
QQWSRNSPYT

SEQ ID NO: 602 - protein, 120 aa, Artificial Sequence
  PM 99-A8 VH
EVQLLESGGGLVQPGGSLRLSCAASGFTFSDFFMAWVRQAPGKGLEWVATIVSDGGSTYYRDSVKGRFTISRDNAKNTLYLQMDSLRAEDTAVYYCAKRGNSGYYVMDAWGQGTTVTVSS

SEQ ID NO: 603 - DNA, 360 bp, Artificial Sequence
  PM 99-A8 VH
gaggtgcagctgctcgagtctggtggaggcttagtgcagcctggagggtccctaagactctcctgtgcagcctcaggattcactttcagtgactttttcatggcctgggtccgccaggctccagggaaggggctggagtgggtcgcaaccattgtttctgatggtggtagcacttactatcgcgactccgtgaagggccgtttcactatctccagagataatgcaaaaaacaccctgtacctgcaaatggacagtctgagggctgaggacacggccgtttattactgtgcaaaacgcggcaattcggggtactatgttatggatgcctggggtcaaggaactacggtcaccgtctcctca

SEQ ID NO: 604 - protein, 5 aa, Artificial Sequence
  PM 99-A8 HCDR1
DFFMA

SEQ ID NO: 605 - protein, 17 aa, Artificial Sequence
  PM 99-A8 HCDR2
TIVSDGGSTYYRDSVKG

SEQ ID NO: 606 - protein, 11 aa, Artificial Sequence
  PM 99-A8 HCDR3
RGNSGYYVMDA

SEQ ID NO: 607 - protein, 242 aa, Artificial Sequence
  PM 99-A8 HL
EVQLLESGGGLVQPGGSLRLSCAASGFTFSDFFMAWVRQAPGKGLEWVATIVSDGGSTYYRDSVKGRFTISRDNAKNTLYLQMDSLRAEDTAVYYCAKRGNSGYYVMDAWGQGTTVTVSSGGGGSGGGGSGGGGSDIQMTQSPSTLAASAGEKVTITCRASSSVTYMHWYQQKPGKAPKLLIYDTSKVASGVPSRFSGSGSGTAFTLTISSVQTDDFATYYCQQWSRNSPYTFGQGTKLEIK

SEQ ID NO: 608 - DNA, 726 bp, Artificial Sequence
  PM 99-A8 HL
gaggtgcagctgctcgagtctggtggaggcttagtgcagcctggagggtccctaagactctcctgtgcagcctcaggattcactttcagtgactttttcatggcctgggtccgccaggctccagggaaggggctggagtgggtcgcaaccattgtttctgatggtggtagcacttactatcgcgactccgtgaagggccgtttcactatctccagagataatgcaaaaaacaccctgtacctgcaaatggacagtctgagggctgaggacacggccgtttattactgtgcaaaacgcggcaattcggggtactatgttatggatgcctggggtcaaggaactacggtcaccgtctcctcaggtggtggtggttctggcggcggcggctccggtggtggtggttctgacatccagatgactcagtctccatcaaccctggctgcatctgcgggggagaaagtcaccatcacctgccgtgccagctccagtgtgacttacatgcactggtaccagcagaagccaggcaaagcccctaaattattgatttatgacacatccaaagtggcttctggagtcccaagtcgcttcagtggcagtgggtctgggaccgcatttactctcacaatcagctccgtgcagactgatgactttgccacttattactgtcagcagtggagtaggaactcaccctacacgtttggacaggggaccaagctggaaatcaaa

SEQ ID NO: 609 - protein, 497 aa, Artificial Sequence
  PM 99-A8  HL x I2C HL
EVQLLESGGGLVQPGGSLRLSCAASGFTFSDFFMAWVRQAPGKGLEWVATIVSDGGSTYYRDSVKGRFTISRDNAKNTLYLQMDSLRAEDTAVYYCAKRGNSGYYVMDAWGQGTTVTVSSGGGGSGGGGSGGGGSDIQMTQSPSTLAASAGEKVTITCRASSSVTYMHWYQQKPGKAPKLLIYDTSKVASGVPSRFSGSGSGTAFTLTISSVQTDDFATYYCQQWSRNSPYTFGQGTKLEIKSGGGGSEVQLVESGGGLVQPGGSLKLSCAASGFTFNKYAMNWVRQAPGKGLEWVARIRSKYNNYATYYADSVKDRFTISRDDSKNTAYLQMNNLKTEDTAVYYCVRHGNFGNSYISYWAYWGQGTLVTVSSGGGGSGGGGSGGGGSQTVVTQEPSLTVSPGGTVTLTCGSSTGAVTSGNYPNWVQQKPGQAPRGLIGGTKFLAPGTPARFSGSLLGGKAALTLSGVQPEDEAEYYCVLWYSNRWVFGGGTKLTVL

SEQ ID NO: 610 - DNA, 1491 bp, Artificial Sequence
  PM 99-A8  HL x I2C HL
gaggtgcagctgctcgagtctggtggaggcttagtgcagcctggagggtccctaagactctcctgtgcagcctcaggattcactttcagtgactttttcatggcctgggtccgccaggctccagggaaggggctggagtgggtcgcaaccattgtttctgatggtggtagcacttactatcgcgactccgtgaagggccgtttcactatctccagagataatgcaaaaaacaccctgtacctgcaaatggacagtctgagggctgaggacacggccgtttattactgtgcaaaacgcggcaattcggggtactatgttatggatgcctggggtcaaggaactacggtcaccgtctcctcaggtggtggtggttctggcggcggcggctccggtggtggtggttctgacatccagatgactcagtctccatcaaccctggctgcatctgcgggggagaaagtcaccatcacctgccgtgccagctccagtgtgacttacatgcactggtaccagcagaagccaggcaaagcccctaaattattgatttatgacacatccaaagtggcttctggagtcccaagtcgcttcagtggcagtgggtctgggaccgcatttactctcacaatcagctccgtgcagactgatgactttgccacttattactgtcagcagtggagtaggaactcaccctacacgtttggacaggggaccaagctggaaatcaaatccggaggtggtggatccgaggtgcagctggtcgagtctggaggaggattggtgcagcctggagggtcattgaaactctcatgtgcagcctctggattcaccttcaataagtacgccatgaactgggtccgccaggctccaggaaagggtttggaatgggttgctcgcataagaagtaaatataataattatgcaacatattatgccgattcagtgaaagacaggttcaccatctccagagatgattcaaaaaacactgcctatctacaaatgaacaacttgaaaactgaggacactgccgtgtactactgtgtgagacatgggaacttcggtaatagctacatatcctactgggcttactggggccaagggactctggtcaccgtctcctcaggtggtggtggttctggcggcggcggctccggtggtggtggttctcagactgttgtgactcaggaaccttcactcaccgtatcacctggtggaacagtcacactcacttgtggctcctcgactggggctgttacatctggcaactacccaaactgggtccaacaaaaaccaggtcaggcaccccgtggtctaataggtgggactaagttcctcgcccccggtactcctgccagattctcaggctccctgcttggaggcaaggctgccctcaccctctcaggggtacagccagaggatgaggcagaatattactgtgttctatggtacagcaaccgctgggtgttcggtggaggaaccaaactgactgtccta

SEQ ID NO: 611 - protein, 107 aa, Artificial Sequence
  PM 86-A10 VL
DIQMTQSPSTLSASVGDRVTITCRASSSVTYMHWYQQKPGKAPKLLIYDTSKVASGVPSRFSGSGSGTEFTLTISSPQPDDFATYYCQQWSRNSPYTFGQGTKLEIK

SEQ ID NO: 612 - DNA, 321 bp, Artificial Sequence
  PM 86-A10 VL
gacatccagatgactcagtctccatcaaccctgtctgcatctgtgggggacagagtcaccatcacctgccgggccagctccagtgtgacttacatgcactggtaccagcagaagccaggcaaagcccctaaattattgatttatgacacatccaaagtggcttctggagtcccaagtcgcttcagtggcagtgggtctgggaccgaatttactctcacaatcagctccccgcagcctgatgactttgccacttattactgtcagcagtggagtaggaactcaccctacacgtttgggcaggggaccaagctggaaatcaaa

SEQ ID NO: 613 - protein, 10 aa, Artificial Sequence
  PM 86-A10 LCDR1
RASSSVTYMH

SEQ ID NO: 614 - protein, 7 aa, Artificial Sequence
  PM 86-A10 LCDR2
DTSKVAS

SEQ ID NO: 615 - protein, 10 aa, Artificial Sequence
  PM 86-A10 LCDR3
QQWSRNSPYT

SEQ ID NO: 616 - protein, 120 aa, Artificial Sequence
  PM 86-A10 VH
EVQLLESDGGLVQPGGSLKLSCAASGFTFSDFFMAWVRQAPGKGLEWVATIVSDGGSTYYRDSVKGRFTISRDNSKNTLYLQMNNLRSEDTAVYYCAKRGNSGYYVMDAWGQGTTVTVSS

SEQ ID NO: 617 - DNA, 360 bp, Artificial Sequence
  PM 86-A10 VH
gaggtgcagctgctcgagtctgatggaggcttagtgcagcctggagggtccctaaaactctcctgtgcagcctcaggattcactttcagtgactttttcatggcctgggtccgccaggctccagggaaggggctggagtgggtcgcaaccattgtttctgatggtggtagcacttactatcgcgactccgtgaagggccgtttcactatctccagagataattcaaaaaacaccctgtacctgcaaatgaacaatctgaggtctgaggacacggccgtttattactgtgcaaaacgcggcaattcggggtactatgttatggatgcctggggtcaaggaactacggtcaccgtctcctca

SEQ ID NO: 618 - protein, 5 aa, Artificial Sequence
  PM 86-A10 HCDR1
DFFMA

SEQ ID NO: 619 - protein, 17 aa, Artificial Sequence
  PM 86-A10 HCDR2
TIVSDGGSTYYRDSVKG

SEQ ID NO: 620 - protein, 11 aa, Artificial Sequence
  PM 86-A10 HCDR3
RGNSGYYVMDA

SEQ ID NO: 621 - protein, 242 aa, Artificial Sequence
  PM 86-A10 HL
EVQLLESDGGLVQPGGSLKLSCAASGFTFSDFFMAWVRQAPGKGLEWVATIVSDGGSTYYRDSVKGRFTISRDNSKNTLYLQMNNLRSEDTAVYYCAKRGNSGYYVMDAWGQGTTVTVSSGGGGSGGGGSGGGGSDIQMTQSPSTLSASVGDRVTITCRASSSVTYMHWYQQKPGKAPKLLIYDTSKVASGVPSRFSGSGSGTEFTLTISSPQPDDFATYYCQQWSRNSPYTFGQGTKLEIK

SEQ ID NO: 622 - DNA, 726 bp, Artificial Sequence
  PM 86-A10 HL
gaggtgcagctgctcgagtctgatggaggcttagtgcagcctggagggtccctaaaactctcctgtgcagcctcaggattcactttcagtgactttttcatggcctgggtccgccaggctccagggaaggggctggagtgggtcgcaaccattgtttctgatggtggtagcacttactatcgcgactccgtgaagggccgtttcactatctccagagataattcaaaaaacaccctgtacctgcaaatgaacaatctgaggtctgaggacacggccgtttattactgtgcaaaacgcggcaattcggggtactatgttatggatgcctggggtcaaggaactacggtcaccgtctcctcaggtggtggtggttctggcggcggcggctccggtggtggtggttctgacatccagatgactcagtctccatcaaccctgtctgcatctgtgggggacagagtcaccatcacctgccgggccagctccagtgtgacttacatgcactggtaccagcagaagccaggcaaagcccctaaattattgatttatgacacatccaaagtggcttctggagtcccaagtcgcttcagtggcagtgggtctgggaccgaatttactctcacaatcagctccccgcagcctgatgactttgccacttattactgtcagcagtggagtaggaactcaccctacacgtttgggcaggggaccaagctggaaatcaaa

SEQ ID NO: 623 - protein, 497 aa, Artificial Sequence
  PM 86-A10  HL x I2C HL
EVQLLESDGGLVQPGGSLKLSCAASGFTFSDFFMAWVRQAPGKGLEWVATIVSDGGSTYYRDSVKGRFTISRDNSKNTLYLQMNNLRSEDTAVYYCAKRGNSGYYVMDAWGQGTTVTVSSGGGGSGGGGSGGGGSDIQMTQSPSTLSASVGDRVTITCRASSSVTYMHWYQQKPGKAPKLLIYDTSKVASGVPSRFSGSGSGTEFTLTISSPQPDDFATYYCQQWSRNSPYTFGQGTKLEIKSGGGGSEVQLVESGGGLVQPGGSLKLSCAASGFTFNKYAMNWVRQAPGKGLEWVARIRSKYNNYATYYADSVKDRFTISRDDSKNTAYLQMNNLKTEDTAVYYCVRHGNFGNSYISYWAYWGQGTLVTVSSGGGGSGGGGSGGGGSQTVVTQEPSLTVSPGGTVTLTCGSSTGAVTSGNYPNWVQQKPGQAPRGLIGGTKFLAPGTPARFSGSLLGGKAALTLSGVQPEDEAEYYCVLWYSNRWVFGGGTKLTVL

SEQ ID NO: 624 - DNA, 1491 bp, Artificial Sequence
  PM 86-A10  HL x I2C HL
gaggtgcagctgctcgagtctgatggaggcttagtgcagcctggagggtccctaaaactctcctgtgcagcctcaggattcactttcagtgactttttcatggcctgggtccgccaggctccagggaaggggctggagtgggtcgcaaccattgtttctgatggtggtagcacttactatcgcgactccgtgaagggccgtttcactatctccagagataattcaaaaaacaccctgtacctgcaaatgaacaatctgaggtctgaggacacggccgtttattactgtgcaaaacgcggcaattcggggtactatgttatggatgcctggggtcaaggaactacggtcaccgtctcctcaggtggtggtggttctggcggcggcggctccggtggtggtggttctgacatccagatgactcagtctccatcaaccctgtctgcatctgtgggggacagagtcaccatcacctgccgggccagctccagtgtgacttacatgcactggtaccagcagaagccaggcaaagcccctaaattattgatttatgacacatccaaagtggcttctggagtcccaagtcgcttcagtggcagtgggtctgggaccgaatttactctcacaatcagctccccgcagcctgatgactttgccacttattactgtcagcagtggagtaggaactcaccctacacgtttgggcaggggaccaagctggaaatcaaatccggaggtggtggatccgaggtgcagctggtcgagtctggaggaggattggtgcagcctggagggtcattgaaactctcatgtgcagcctctggattcaccttcaataagtacgccatgaactgggtccgccaggctccaggaaagggtttggaatgggttgctcgcataagaagtaaatataataattatgcaacatattatgccgattcagtgaaagacaggttcaccatctccagagatgattcaaaaaacactgcctatctacaaatgaacaacttgaaaactgaggacactgccgtgtactactgtgtgagacatgggaacttcggtaatagctacatatcctactgggcttactggggccaagggactctggtcaccgtctcctcaggtggtggtggttctggcggcggcggctccggtggtggtggttctcagactgttgtgactcaggaaccttcactcaccgtatcacctggtggaacagtcacactcacttgtggctcctcgactggggctgttacatctggcaactacccaaactgggtccaacaaaaaccaggtcaggcaccccgtggtctaataggtgggactaagttcctcgcccccggtactcctgccagattctcaggctccctgcttggaggcaaggctgccctcaccctctcaggggtacagccagaggatgaggcagaatattactgtgttctatggtacagcaaccgctgggtgttcggtggaggaaccaaactgactgtccta

SEQ ID NO: 625 - protein, 107 aa, Artificial Sequence
  PM 86-B4-2 VL
DIQMTQSPSTLAASPGDRVTITCRASSSVTYMHWYQQKPGKSPKLLIYDTSKVASGVPNRFSGSGSGTEFTLTISSLQPDDIATYYCQQWSRNSPYTFGQGTKLEIK

SEQ ID NO: 626 - DNA, 321 bp, Artificial Sequence
  PM 86-B4-2 VL
gacatccagatgactcagtctccatcaaccctggctgcatctccgggggacagagtcaccatcacctgccgtgccagctccagtgtgacttacatgcactggtaccagcagaagccaggcaaatcccctaaattattgatttatgacacatccaaagtggcttctggagtcccaaatcgcttcagtggcagtgggtctgggaccgaatttactctcacaatcagctccctgcagcctgatgacattgccacttattactgtcagcagtggagtaggaactcaccctacacgtttggacaggggaccaagctggaaatcaaa

SEQ ID NO: 627 - protein, 10 aa, Artificial Sequence
  PM 86-B4-2 LCDR1
RASSSVTYMH

SEQ ID NO: 628 - protein, 7 aa, Artificial Sequence
  PM 86-B4-2 LCDR2
DTSKVAS

SEQ ID NO: 629 - protein, 10 aa, Artificial Sequence
  PM 86-B4-2 LCDR3
QQWSRNSPYT

SEQ ID NO: 630 - protein, 120 aa, Artificial Sequence
  PM 86-B4-2 VH
EVQLLESDGGLVQPGGSLRLSCAASGFTFSDFFMAWVRQAPGKGLEWVATIVSDGGSTYYRDSVKGRFTISRDNSKNTLYLQMNSLRAEDTAVYYCAKRGNSGYYVMDAWGQGTTVTVSS

SEQ ID NO: 631 - DNA, 360 bp, Artificial Sequence
  PM 86-B4-2 VH
gaggtgcagctgctcgagtctgatggaggcttagtgcagcctggagggtccctaagactctcctgtgcagcctcaggattcactttcagtgactttttcatggcctgggtccgccaggctccagggaaggggctggagtgggtcgcaaccattgtttctgatggtggtagcacttactatcgcgactccgtgaagggccgtttcactatctccagagataattcaaaaaacaccctgtacctgcaaatgaacagtctgagggctgaggacacggccgtttattactgtgcaaaacgcggcaattcggggtactatgttatggatgcctggggtcaaggaactacggtcaccgtctcctca

SEQ ID NO: 632 - protein, 5 aa, Artificial Sequence
  PM 86-B4-2 HCDR1
DFFMA

SEQ ID NO: 633 - protein, 17 aa, Artificial Sequence
  PM 86-B4-2 HCDR2
TIVSDGGSTYYRDSVKG

SEQ ID NO: 634 - protein, 11 aa, Artificial Sequence
  PM 86-B4-2 HCDR3
RGNSGYYVMDA

SEQ ID NO: 635 - protein, 242 aa, Artificial Sequence
  PM 86-B4-2 HL
EVQLLESDGGLVQPGGSLRLSCAASGFTFSDFFMAWVRQAPGKGLEWVATIVSDGGSTYYRDSVKGRFTISRDNSKNTLYLQMNSLRAEDTAVYYCAKRGNSGYYVMDAWGQGTTVTVSSGGGGSGGGGSGGGGSDIQMTQSPSTLAASPGDRVTITCRASSSVTYMHWYQQKPGKSPKLLIYDTSKVASGVPNRFSGSGSGTEFTLTISSLQPDDIATYYCQQWSRNSPYTFGQGTKLEIK

SEQ ID NO: 636 - DNA, 726 bp, Artificial Sequence
  PM 86-B4-2 HL
gaggtgcagctgctcgagtctgatggaggcttagtgcagcctggagggtccctaagactctcctgtgcagcctcaggattcactttcagtgactttttcatggcctgggtccgccaggctccagggaaggggctggagtgggtcgcaaccattgtttctgatggtggtagcacttactatcgcgactccgtgaagggccgtttcactatctccagagataattcaaaaaacaccctgtacctgcaaatgaacagtctgagggctgaggacacggccgtttattactgtgcaaaacgcggcaattcggggtactatgttatggatgcctggggtcaaggaactacggtcaccgtctcctcaggtggtggtggttctggcggcggcggctccggtggtggtggttctgacatccagatgactcagtctccatcaaccctggctgcatctccgggggacagagtcaccatcacctgccgtgccagctccagtgtgacttacatgcactggtaccagcagaagccaggcaaatcccctaaattattgatttatgacacatccaaagtggcttctggagtcccaaatcgcttcagtggcagtgggtctgggaccgaatttactctcacaatcagctccctgcagcctgatgacattgccacttattactgtcagcagtggagtaggaactcaccctacacgtttggacaggggaccaagctggaaatcaaa

SEQ ID NO: 637 - protein, 497 aa, Artificial Sequence
  PM 86-B4-2  HL x I2C HL
EVQLLESDGGLVQPGGSLRLSCAASGFTFSDFFMAWVRQAPGKGLEWVATIVSDGGSTYYRDSVKGRFTISRDNSKNTLYLQMNSLRAEDTAVYYCAKRGNSGYYVMDAWGQGTTVTVSSGGGGSGGGGSGGGGSDIQMTQSPSTLAASPGDRVTITCRASSSVTYMHWYQQKPGKSPKLLIYDTSKVASGVPNRFSGSGSGTEFTLTISSLQPDDIATYYCQQWSRNSPYTFGQGTKLEIKSGGGGSEVQLVESGGGLVQPGGSLKLSCAASGFTFNKYAMNWVRQAPGKGLEWVARIRSKYNNYATYYADSVKDRFTISRDDSKNTAYLQMNNLKTEDTAVYYCVRHGNFGNSYISYWAYWGQGTLVTVSSGGGGSGGGGSGGGGSQTVVTQEPSLTVSPGGTVTLTCGSSTGAVTSGNYPNWVQQKPGQAPRGLIGGTKFLAPGTPARFSGSLLGGKAALTLSGVQPEDEAEYYCVLWYSNRWVFGGGTKLTVL

SEQ ID NO: 638 - DNA, 1491 bp, Artificial Sequence
  PM 86-B4-2  HL x I2C HL
gaggtgcagctgctcgagtctgatggaggcttagtgcagcctggagggtccctaagactctcctgtgcagcctcaggattcactttcagtgactttttcatggcctgggtccgccaggctccagggaaggggctggagtgggtcgcaaccattgtttctgatggtggtagcacttactatcgcgactccgtgaagggccgtttcactatctccagagataattcaaaaaacaccctgtacctgcaaatgaacagtctgagggctgaggacacggccgtttattactgtgcaaaacgcggcaattcggggtactatgttatggatgcctggggtcaaggaactacggtcaccgtctcctcaggtggtggtggttctggcggcggcggctccggtggtggtggttctgacatccagatgactcagtctccatcaaccctggctgcatctccgggggacagagtcaccatcacctgccgtgccagctccagtgtgacttacatgcactggtaccagcagaagccaggcaaatcccctaaattattgatttatgacacatccaaagtggcttctggagtcccaaatcgcttcagtggcagtgggtctgggaccgaatttactctcacaatcagctccctgcagcctgatgacattgccacttattactgtcagcagtggagtaggaactcaccctacacgtttggacaggggaccaagctggaaatcaaatccggaggtggtggatccgaggtgcagctggtcgagtctggaggaggattggtgcagcctggagggtcattgaaactctcatgtgcagcctctggattcaccttcaataagtacgccatgaactgggtccgccaggctccaggaaagggtttggaatgggttgctcgcataagaagtaaatataataattatgcaacatattatgccgattcagtgaaagacaggttcaccatctccagagatgattcaaaaaacactgcctatctacaaatgaacaacttgaaaactgaggacactgccgtgtactactgtgtgagacatgggaacttcggtaatagctacatatcctactgggcttactggggccaagggactctggtcaccgtctcctcaggtggtggtggttctggcggcggcggctccggtggtggtggttctcagactgttgtgactcaggaaccttcactcaccgtatcacctggtggaacagtcacactcacttgtggctcctcgactggggctgttacatctggcaactacccaaactgggtccaacaaaaaccaggtcaggcaccccgtggtctaataggtgggactaagttcctcgcccccggtactcctgccagattctcaggctccctgcttggaggcaaggctgccctcaccctctcaggggtacagccagaggatgaggcagaatattactgtgttctatggtacagcaaccgctgggtgttcggtggaggaaccaaactgactgtccta

SEQ ID NO: 639 - protein, 107 aa, Artificial Sequence
  PM 98-B4 VL
DIQMTQSPSTLSASVGEKVTITCRASSSVTYMHWYQQKPGKSPKLLIYDTSKVASGVPSRFSGSGSGTAYTLTISSLQTDDFATYYCQQWSRNSPYTFGQGTKLEIK

SEQ ID NO: 640 - DNA, 321 bp, Artificial Sequence
  PM 98-B4 VL
gacatccagatgactcagtctccatcaaccctgtctgcatctgtgggggagaaagtcaccatcacctgccgtgccagctccagtgtgacttacatgcactggtaccagcagaagccaggcaaatcccctaaattattgatttatgacacatccaaagtggcttctggagtcccaagtcgcttcagtggcagtgggtctgggaccgcatatactctcacaatcagctccctgcagactgatgactttgccacttattactgtcagcagtggagtaggaactcaccctacacgtttggacaggggaccaagctggaaatcaaa

SEQ ID NO: 641 - protein, 10 aa, Artificial Sequence
  PM 98-B4 LCDR1
RASSSVTYMH

SEQ ID NO: 642 - protein, 7 aa, Artificial Sequence
  PM 98-B4 LCDR2
DTSKVAS

SEQ ID NO: 643 - protein, 10 aa, Artificial Sequence
  PM 98-B4 LCDR3
QQWSRNSPYT

SEQ ID NO: 644 - protein, 120 aa, Artificial Sequence
  PM 98-B4 VH
EVQLLESGGGLVQPGGSLRLSCAASGFTFSDFFMAWIRQAPGKGLEWVSTIVSDGGSTYYRDSVKGRFTISRDNSQSTLYLQMDSLTAEDTAVYYCAKRGNSGYYVMDAWGQGTTVTVSS

SEQ ID NO: 645 - DNA, 360 bp, Artificial Sequence
  PM 98-B4 VH
gaggtgcagctgctcgagtctggtggaggcttagtgcagcctggagggtccctaagactctcctgtgcagcctcaggattcactttcagtgactttttcatggcctggatccgccaggctccagggaaggggctggagtgggtctcaaccattgtttctgatggtggtagcacttactatcgcgactccgtgaagggccgtttcactatctccagagataattcacaaagcaccctgtacctgcaaatggacagtctgacggctgaggacacggccgtttattactgtgcaaaacgcggcaattcggggtactatgttatggatgcctggggtcaaggaactacggtcaccgtctcctca

SEQ ID NO: 646 - protein, 5 aa, Artificial Sequence
  PM 98-B4 HCDR1
DFFMA

SEQ ID NO: 647 - protein, 17 aa, Artificial Sequence
  PM 98-B4 HCDR2
TIVSDGGSTYYRDSVKG

SEQ ID NO: 648 - protein, 11 aa, Artificial Sequence
  PM 98-B4 HCDR3
RGNSGYYVMDA

SEQ ID NO: 649 - protein, 242 aa, Artificial Sequence
  PM 98-B4 HL
EVQLLESGGGLVQPGGSLRLSCAASGFTFSDFFMAWIRQAPGKGLEWVSTIVSDGGSTYYRDSVKGRFTISRDNSQSTLYLQMDSLTAEDTAVYYCAKRGNSGYYVMDAWGQGTTVTVSSGGGGSGGGGSGGGGSDIQMTQSPSTLSASVGEKVTITCRASSSVTYMHWYQQKPGKSPKLLIYDTSKVASGVPSRFSGSGSGTAYTLTISSLQTDDFATYYCQQWSRNSPYTFGQGTKLEIK

SEQ ID NO: 650 - DNA, 726 bp, Artificial Sequence
  PM 98-B4 HL
gaggtgcagctgctcgagtctggtggaggcttagtgcagcctggagggtccctaagactctcctgtgcagcctcaggattcactttcagtgactttttcatggcctggatccgccaggctccagggaaggggctggagtgggtctcaaccattgtttctgatggtggtagcacttactatcgcgactccgtgaagggccgtttcactatctccagagataattcacaaagcaccctgtacctgcaaatggacagtctgacggctgaggacacggccgtttattactgtgcaaaacgcggcaattcggggtactatgttatggatgcctggggtcaaggaactacggtcaccgtctcctcaggtggtggtggttctggcggcggcggctccggtggtggtggttctgacatccagatgactcagtctccatcaaccctgtctgcatctgtgggggagaaagtcaccatcacctgccgtgccagctccagtgtgacttacatgcactggtaccagcagaagccaggcaaatcccctaaattattgatttatgacacatccaaagtggcttctggagtcccaagtcgcttcagtggcagtgggtctgggaccgcatatactctcacaatcagctccctgcagactgatgactttgccacttattactgtcagcagtggagtaggaactcaccctacacgtttggacaggggaccaagctggaaatcaaa

SEQ ID NO: 651 - protein, 497 aa, Artificial Sequence
  PM 98-B4  HL x I2C HL
EVQLLESGGGLVQPGGSLRLSCAASGFTFSDFFMAWIRQAPGKGLEWVSTIVSDGGSTYYRDSVKGRFTISRDNSQSTLYLQMDSLTAEDTAVYYCAKRGNSGYYVMDAWGQGTTVTVSSGGGGSGGGGSGGGGSDIQMTQSPSTLSASVGEKVTITCRASSSVTYMHWYQQKPGKSPKLLIYDTSKVASGVPSRFSGSGSGTAYTLTISSLQTDDFATYYCQQWSRNSPYTFGQGTKLEIKSGGGGSEVQLVESGGGLVQPGGSLKLSCAASGFTFNKYAMNWVRQAPGKGLEWVARIRSKYNNYATYYADSVKDRFTISRDDSKNTAYLQMNNLKTEDTAVYYCVRHGNFGNSYISYWAYWGQGTLVTVSSGGGGSGGGGSGGGGSQTVVTQEPSLTVSPGGTVTLTCGSSTGAVTSGNYPNWVQQKPGQAPRGLIGGTKFLAPGTPARFSGSLLGGKAALTLSGVQPEDEAEYYCVLWYSNRWVFGGGTKLTVL

SEQ ID NO: 652 - DNA, 1491 bp, Artificial Sequence
  PM 98-B4  HL x I2C HL
gaggtgcagctgctcgagtctggtggaggcttagtgcagcctggagggtccctaagactctcctgtgcagcctcaggattcactttcagtgactttttcatggcctggatccgccaggctccagggaaggggctggagtgggtctcaaccattgtttctgatggtggtagcacttactatcgcgactccgtgaagggccgtttcactatctccagagataattcacaaagcaccctgtacctgcaaatggacagtctgacggctgaggacacggccgtttattactgtgcaaaacgcggcaattcggggtactatgttatggatgcctggggtcaaggaactacggtcaccgtctcctcaggtggtggtggttctggcggcggcggctccggtggtggtggttctgacatccagatgactcagtctccatcaaccctgtctgcatctgtgggggagaaagtcaccatcacctgccgtgccagctccagtgtgacttacatgcactggtaccagcagaagccaggcaaatcccctaaattattgatttatgacacatccaaagtggcttctggagtcccaagtcgcttcagtggcagtgggtctgggaccgcatatactctcacaatcagctccctgcagactgatgactttgccacttattactgtcagcagtggagtaggaactcaccctacacgtttggacaggggaccaagctggaaatcaaatccggaggtggtggatccgaggtgcagctggtcgagtctggaggaggattggtgcagcctggagggtcattgaaactctcatgtgcagcctctggattcaccttcaataagtacgccatgaactgggtccgccaggctccaggaaagggtttggaatgggttgctcgcataagaagtaaatataataattatgcaacatattatgccgattcagtgaaagacaggttcaccatctccagagatgattcaaaaaacactgcctatctacaaatgaacaacttgaaaactgaggacactgccgtgtactactgtgtgagacatgggaacttcggtaatagctacatatcctactgggcttactggggccaagggactctggtcaccgtctcctcaggtggtggtggttctggcggcggcggctccggtggtggtggttctcagactgttgtgactcaggaaccttcactcaccgtatcacctggtggaacagtcacactcacttgtggctcctcgactggggctgttacatctggcaactacccaaactgggtccaacaaaaaccaggtcaggcaccccgtggtctaataggtgggactaagttcctcgcccccggtactcctgccagattctcaggctccctgcttggaggcaaggctgccctcaccctctcaggggtacagccagaggatgaggcagaatattactgtgttctatggtacagcaaccgctgggtgttcggtggaggaaccaaactgactgtccta

SEQ ID NO: 653 - protein, 107 aa, Artificial Sequence
  PM 86-C3 VL
DIQMTQSPSTLAASVGDRVTITCRASSSVTYMHWYQQKPGKAPKLLIYDTSKVASGVPNRFSGSGSGTEFTLTISSLQTDDSATYYCQQWSRNSPYTFGQGTKLEIK

SEQ ID NO: 654 - DNA, 321 bp, Artificial Sequence
  PM 86-C3 VL
gacatccagatgactcagtctccatcaaccctggctgcatctgtgggggacagagtcaccatcacctgccgtgccagctccagtgtgacttacatgcactggtaccagcagaagccaggcaaagcccctaaattattgatttatgacacatccaaagtggcttctggagtcccaaatcgcttcagtggcagtgggtctgggaccgaatttactctcacaatcagctccctgcagactgatgactctgccacttattactgtcagcagtggagtaggaactcaccctacacgtttggacaggggaccaagctggaaatcaaa

SEQ ID NO: 655 - protein, 10 aa, Artificial Sequence
  PM 86-C3 LCDR1
RASSSVTYMH

SEQ ID NO: 656 - protein, 7 aa, Artificial Sequence
  PM 86-C3 LCDR2
DTSKVAS

SEQ ID NO: 657 - protein, 10 aa, Artificial Sequence
  PM 86-C3 LCDR3
QQWSRNSPYT

SEQ ID NO: 658 - protein, 120 aa, Artificial Sequence
  PM 86-C3 VH
EVQLLESGGGLVQPGGSLKLSCAASGFTFSDFFMAWVRQAPGKGLEWVATIVSDGGSTYYRDSVKGRFTISRDNAKNTLYLQMNSLTAEDTAIYYCAKRGNSGYYVMDAWGQGTTVTVSS

SEQ ID NO: 659 - DNA, 360 bp, Artificial Sequence
  PM 86-C3 VH
gaggtgcagctgctcgagtctggtggaggcttagtgcagcctggagggtccctaaaactctcctgtgcagcctcaggattcactttcagtgactttttcatggcctgggtccgccaggctccagggaaggggctggagtgggtcgcaaccattgtttctgatggtggtagcacttactatcgtgactccgtgaagggccgtttcactatctccagagataatgcaaaaaacaccctgtacctgcaaatgaacagtctgacggctgaggacacggccatttattactgtgcaaaacgcggcaattcggggtactatgttatggatgcctggggtcaaggaactacggtcaccgtctcctca

SEQ ID NO: 660 - protein, 5 aa, Artificial Sequence
  PM 86-C3 HCDR1
DFFMA

SEQ ID NO: 661 - protein, 17 aa, Artificial Sequence
  PM 86-C3 HCDR2
TIVSDGGSTYYRDSVKG

SEQ ID NO: 662 - protein, 11 aa, Artificial Sequence
  PM 86-C3 HCDR3
RGNSGYYVMDA

SEQ ID NO: 663 - protein, 242 aa, Artificial Sequence
  PM 86-C3 HL
EVQLLESGGGLVQPGGSLKLSCAASGFTFSDFFMAWVRQAPGKGLEWVATIVSDGGSTYYRDSVKGRFTISRDNAKNTLYLQMNSLTAEDTAIYYCAKRGNSGYYVMDAWGQGTTVTVSSGGGGSGGGGSGGGGSDIQMTQSPSTLAASVGDRVTITCRASSSVTYMHWYQQKPGKAPKLLIYDTSKVASGVPNRFSGSGSGTEFTLTISSLQTDDSATYYCQQWSRNSPYTFGQGTKLEIK

SEQ ID NO: 664 - DNA, 726 bp, Artificial Sequence
  PM 86-C3 HL
gaggtgcagctgctcgagtctggtggaggcttagtgcagcctggagggtccctaaaactctcctgtgcagcctcaggattcactttcagtgactttttcatggcctgggtccgccaggctccagggaaggggctggagtgggtcgcaaccattgtttctgatggtggtagcacttactatcgtgactccgtgaagggccgtttcactatctccagagataatgcaaaaaacaccctgtacctgcaaatgaacagtctgacggctgaggacacggccatttattactgtgcaaaacgcggcaattcggggtactatgttatggatgcctggggtcaaggaactacggtcaccgtctcctcaggtggtggtggttctggcggcggcggctccggtggtggtggttctgacatccagatgactcagtctccatcaaccctggctgcatctgtgggggacagagtcaccatcacctgccgtgccagctccagtgtgacttacatgcactggtaccagcagaagccaggcaaagcccctaaattattgatttatgacacatccaaagtggcttctggagtcccaaatcgcttcagtggcagtgggtctgggaccgaatttactctcacaatcagctccctgcagactgatgactctgccacttattactgtcagcagtggagtaggaactcaccctacacgtttggacaggggaccaagctggaaatcaaa

SEQ ID NO: 665 - protein, 497 aa, Artificial Sequence
  PM 86-C3  HL x I2C HL
EVQLLESGGGLVQPGGSLKLSCAASGFTFSDFFMAWVRQAPGKGLEWVATIVSDGGSTYYRDSVKGRFTISRDNAKNTLYLQMNSLTAEDTAIYYCAKRGNSGYYVMDAWGQGTTVTVSSGGGGSGGGGSGGGGSDIQMTQSPSTLAASVGDRVTITCRASSSVTYMHWYQQKPGKAPKLLIYDTSKVASGVPNRFSGSGSGTEFTLTISSLQTDDSATYYCQQWSRNSPYTFGQGTKLEIKSGGGGSEVQLVESGGGLVQPGGSLKLSCAASGFTFNKYAMNWVRQAPGKGLEWVARIRSKYNNYATYYADSVKDRFTISRDDSKNTAYLQMNNLKTEDTAVYYCVRHGNFGNSYISYWAYWGQGTLVTVSSGGGGSGGGGSGGGGSQTVVTQEPSLTVSPGGTVTLTCGSSTGAVTSGNYPNWVQQKPGQAPRGLIGGTKFLAPGTPARFSGSLLGGKAALTLSGVQPEDEAEYYCVLWYSNRWVFGGGTKLTVL

SEQ ID NO: 666 - DNA, 1491 bp, Artificial Sequence
  PM 86-C3  HL x I2C HL
gaggtgcagctgctcgagtctggtggaggcttagtgcagcctggagggtccctaaaactctcctgtgcagcctcaggattcactttcagtgactttttcatggcctgggtccgccaggctccagggaaggggctggagtgggtcgcaaccattgtttctgatggtggtagcacttactatcgtgactccgtgaagggccgtttcactatctccagagataatgcaaaaaacaccctgtacctgcaaatgaacagtctgacggctgaggacacggccatttattactgtgcaaaacgcggcaattcggggtactatgttatggatgcctggggtcaaggaactacggtcaccgtctcctcaggtggtggtggttctggcggcggcggctccggtggtggtggttctgacatccagatgactcagtctccatcaaccctggctgcatctgtgggggacagagtcaccatcacctgccgtgccagctccagtgtgacttacatgcactggtaccagcagaagccaggcaaagcccctaaattattgatttatgacacatccaaagtggcttctggagtcccaaatcgcttcagtggcagtgggtctgggaccgaatttactctcacaatcagctccctgcagactgatgactctgccacttattactgtcagcagtggagtaggaactcaccctacacgtttggacaggggaccaagctggaaatcaaatccggaggtggtggatccgaggtgcagctggtcgagtctggaggaggattggtgcagcctggagggtcattgaaactctcatgtgcagcctctggattcaccttcaataagtacgccatgaactgggtccgccaggctccaggaaagggtttggaatgggttgctcgcataagaagtaaatataataattatgcaacatattatgccgattcagtgaaagacaggttcaccatctccagagatgattcaaaaaacactgcctatctacaaatgaacaacttgaaaactgaggacactgccgtgtactactgtgtgagacatgggaacttcggtaatagctacatatcctactgggcttactggggccaagggactctggtcaccgtctcctcaggtggtggtggttctggcggcggcggctccggtggtggtggttctcagactgttgtgactcaggaaccttcactcaccgtatcacctggtggaacagtcacactcacttgtggctcctcgactggggctgttacatctggcaactacccaaactgggtccaacaaaaaccaggtcaggcaccccgtggtctaataggtgggactaagttcctcgcccccggtactcctgccagattctcaggctccctgcttggaggcaaggctgccctcaccctctcaggggtacagccagaggatgaggcagaatattactgtgttctatggtacagcaaccgctgggtgttcggtggaggaaccaaactgactgtccta

SEQ ID NO: 667 - protein, 107 aa, Artificial Sequence
  PM 86-E12 VL
DIQMTQSPSTLSASAGDRVTITCRASSSVTYMHWYQQKPGTAPKLLIYDTSKVASGVPSRFSGSGSGTEFTLTISSVQPEDIATYYCQQWSRNSPYTFGQGTKLEIK

SEQ ID NO: 668 - DNA, 321 bp, Artificial Sequence
  PM 86-E12 VL
gacatccagatgactcagtctccatcaaccctgtctgcatctgcgggggacagagtcaccatcacctgccgtgccagctccagtgtgacttacatgcactggtaccagcagaagccaggcacagcccctaaattattgatttatgacacatccaaagtggcttctggagtcccaagtcgcttcagtggcagtgggtctgggaccgaatttactctcacaatcagctccgtgcagcctgaagacattgccacttattactgtcagcagtggagtaggaactcaccctacacgtttggacaggggaccaagctggaaatcaaa

SEQ ID NO: 669 - protein, 10 aa, Artificial Sequence
  PM 86-E12 LCDR1
RASSSVTYMH

SEQ ID NO: 670 - protein, 7 aa, Artificial Sequence
  PM 86-E12 LCDR2
DTSKVAS

SEQ ID NO: 671 - protein, 10 aa, Artificial Sequence
  PM 86-E12 LCDR3
QQWSRNSPYT

SEQ ID NO: 672 - protein, 120 aa, Artificial Sequence
  PM 86-E12 VH
EVQLLESGGGLVQPGGSLRLSCAASGFTFSDFFMAWVRQAPTKGLEWVSTIVSDGGSTYYRDSVKGRFTISRDNAKNTLYLQMNSLRAEDTAVYYCARRGNSGYYVMDAWGQGTTVTVSS

SEQ ID NO: 673 - DNA, 360 bp, Artificial Sequence
  PM 86-E12 VH
gaggtgcagctgctcgagtctggtggaggcttagtgcagcctggagggtccctaagactctcctgtgcagcctcaggattcactttcagtgactttttcatggcctgggtccgccaggctccaacgaaggggctggagtgggtctcaaccattgtttctgatggtggtagcacttactatcgcgactccgtgaagggccgtttcactatctccagagataatgcaaaaaacaccctgtacctgcaaatgaacagtctgagggctgaggacacggccgtttattactgtgcaagacgcggcaattcggggtactatgttatggatgcctggggtcaaggaactacggtcaccgtctcctca

SEQ ID NO: 674 - protein, 5 aa, Artificial Sequence
  PM 86-E12 HCDR1
DFFMA

SEQ ID NO: 675 - protein, 17 aa, Artificial Sequence
  PM 86-E12 HCDR2
TIVSDGGSTYYRDSVKG

SEQ ID NO: 676 - protein, 11 aa, Artificial Sequence
  PM 86-E12 HCDR3
RGNSGYYVMDA

SEQ ID NO: 677 - protein, 242 aa, Artificial Sequence
  PM 86-E12 HL
EVQLLESGGGLVQPGGSLRLSCAASGFTFSDFFMAWVRQAPTKGLEWVSTIVSDGGSTYYRDSVKGRFTISRDNAKNTLYLQMNSLRAEDTAVYYCARRGNSGYYVMDAWGQGTTVTVSSGGGGSGGGGSGGGGSDIQMTQSPSTLSASAGDRVTITCRASSSVTYMHWYQQKPGTAPKLLIYDTSKVASGVPSRFSGSGSGTEFTLTISSVQPEDIATYYCQQWSRNSPYTFGQGTKLEIK

SEQ ID NO: 678 - DNA, 726 bp, Artificial Sequence
  PM 86-E12 HL
gaggtgcagctgctcgagtctggtggaggcttagtgcagcctggagggtccctaagactctcctgtgcagcctcaggattcactttcagtgactttttcatggcctgggtccgccaggctccaacgaaggggctggagtgggtctcaaccattgtttctgatggtggtagcacttactatcgcgactccgtgaagggccgtttcactatctccagagataatgcaaaaaacaccctgtacctgcaaatgaacagtctgagggctgaggacacggccgtttattactgtgcaagacgcggcaattcggggtactatgttatggatgcctggggtcaaggaactacggtcaccgtctcctcaggtggtggtggttctggcggcggcggctccggtggtggtggttctgacatccagatgactcagtctccatcaaccctgtctgcatctgcgggggacagagtcaccatcacctgccgtgccagctccagtgtgacttacatgcactggtaccagcagaagccaggcacagcccctaaattattgatttatgacacatccaaagtggcttctggagtcccaagtcgcttcagtggcagtgggtctgggaccgaatttactctcacaatcagctccgtgcagcctgaagacattgccacttattactgtcagcagtggagtaggaactcaccctacacgtttggacaggggaccaagctggaaatcaaa

SEQ ID NO: 679 - protein, 497 aa, Artificial Sequence
  PM 86-E12  HL x I2C HL
EVQLLESGGGLVQPGGSLRLSCAASGFTFSDFFMAWVRQAPTKGLEWVSTIVSDGGSTYYRDSVKGRFTISRDNAKNTLYLQMNSLRAEDTAVYYCARRGNSGYYVMDAWGQGTTVTVSSGGGGSGGGGSGGGGSDIQMTQSPSTLSASAGDRVTITCRASSSVTYMHWYQQKPGTAPKLLIYDTSKVASGVPSRFSGSGSGTEFTLTISSVQPEDIATYYCQQWSRNSPYTFGQGTKLEIKSGGGGSEVQLVESGGGLVQPGGSLKLSCAASGFTFNKYAMNWVRQAPGKGLEWVARIRSKYNNYATYYADSVKDRFTISRDDSKNTAYLQMNNLKTEDTAVYYCVRHGNFGNSYISYWAYWGQGTLVTVSSGGGGSGGGGSGGGGSQTVVTQEPSLTVSPGGTVTLTCGSSTGAVTSGNYPNWVQQKPGQAPRGLIGGTKFLAPGTPARFSGSLLGGKAALTLSGVQPEDEAEYYCVLWYSNRWVFGGGTKLTVL

SEQ ID NO: 680 - DNA, 1491 bp, Artificial Sequence
  PM 86-E12  HL x I2C HL
gaggtgcagctgctcgagtctggtggaggcttagtgcagcctggagggtccctaagactctcctgtgcagcctcaggattcactttcagtgactttttcatggcctgggtccgccaggctccaacgaaggggctggagtgggtctcaaccattgtttctgatggtggtagcacttactatcgcgactccgtgaagggccgtttcactatctccagagataatgcaaaaaacaccctgtacctgcaaatgaacagtctgagggctgaggacacggccgtttattactgtgcaagacgcggcaattcggggtactatgttatggatgcctggggtcaaggaactacggtcaccgtctcctcaggtggtggtggttctggcggcggcggctccggtggtggtggttctgacatccagatgactcagtctccatcaaccctgtctgcatctgcgggggacagagtcaccatcacctgccgtgccagctccagtgtgacttacatgcactggtaccagcagaagccaggcacagcccctaaattattgatttatgacacatccaaagtggcttctggagtcccaagtcgcttcagtggcagtgggtctgggaccgaatttactctcacaatcagctccgtgcagcctgaagacattgccacttattactgtcagcagtggagtaggaactcaccctacacgtttggacaggggaccaagctggaaatcaaatccggaggtggtggatccgaggtgcagctggtcgagtctggaggaggattggtgcagcctggagggtcattgaaactctcatgtgcagcctctggattcaccttcaataagtacgccatgaactgggtccgccaggctccaggaaagggtttggaatgggttgctcgcataagaagtaaatataataattatgcaacatattatgccgattcagtgaaagacaggttcaccatctccagagatgattcaaaaaacactgcctatctacaaatgaacaacttgaaaactgaggacactgccgtgtactactgtgtgagacatgggaacttcggtaatagctacatatcctactgggcttactggggccaagggactctggtcaccgtctcctcaggtggtggtggttctggcggcggcggctccggtggtggtggttctcagactgttgtgactcaggaaccttcactcaccgtatcacctggtggaacagtcacactcacttgtggctcctcgactggggctgttacatctggcaactacccaaactgggtccaacaaaaaccaggtcaggcaccccgtggtctaataggtgggactaagttcctcgcccccggtactcctgccagattctcaggctccctgcttggaggcaaggctgccctcaccctctcaggggtacagccagaggatgaggcagaatattactgtgttctatggtacagcaaccgctgggtgttcggtggaggaaccaaactgactgtccta

SEQ ID NO: 681 - protein, 107 aa, Artificial Sequence
  PM F1-A10 VL
DIQMTQSPSTLSASVGDRVTITCRASSSVTYMHWYQQKPGKAPKLLIYDTSKVASGVPSRFSGSGSGTEFTLTISSLQPDDFATYYCQQWSRNSPYTFGQGTKLEIK

SEQ ID NO: 682 - DNA, 321 bp, Artificial Sequence
  PM F1-A10 VL
gacatccagatgactcagtctccatcaaccctgtctgcatctgtgggggacagagtcaccatcacctgccgggccagctccagtgtgacttacatgcactggtaccagcagaagccaggcaaagcccctaaattattgatttatgacacatccaaagtggcttctggagtcccaagtcgcttcagtggcagtgggtctgggaccgaatttactctcacaatcagctccctgcagcctgatgactttgccacttattactgtcagcagtggagtaggaactcaccctacacgtttgggcaggggaccaagctggaaatcaaa

SEQ ID NO: 683 - protein, 10 aa, Artificial Sequence
  PM F1-A10 LCDR1
RASSSVTYMH

SEQ ID NO: 684 - protein, 7 aa, Artificial Sequence
  PM F1-A10 LCDR2
DTSKVAS

SEQ ID NO: 685 - protein, 10 aa, Artificial Sequence
  PM F1-A10 LCDR3
QQWSRNSPYT

SEQ ID NO: 686 - protein, 120 aa, Artificial Sequence
  PM F1-A10 VH
EVQLLESGGGLVQPGGSLRLSCAASGFTFSDFFMAWVRQAPGRGLEWVSTIVSDGGSTYYRDSVKGRFTISRDNSKNTLYLQMNSLRAEDTAVYYCARRGNSGYYVMDAWGQGTTVTVSS

SEQ ID NO: 687 - DNA, 360 bp, Artificial Sequence
  PM F1-A10 VH
gaggtgcagctgctcgagtctggtggaggcttagtgcagcctggagggtccctaagactctcctgtgcagcctcaggattcactttcagtgactttttcatggcctgggtccgccaggctccagggagggggctggagtgggtctcaaccattgtttctgatggtggtagcacttactatcgcgactccgtgaagggccgtttcactatctccagagataattcaaaaaacaccctgtacctgcaaatgaacagtctgagggctgaggacacggccgtttattactgtgcaagacgcggcaattcggggtactatgttatggatgcctggggtcaaggaactacggtcaccgtctcctca

SEQ ID NO: 688 - protein, 5 aa, Artificial Sequence
  PM F1-A10 HCDR1
DFFMA

SEQ ID NO: 689 - protein, 17 aa, Artificial Sequence
  PM F1-A10 HCDR2
TIVSDGGSTYYRDSVKG

SEQ ID NO: 690 - protein, 11 aa, Artificial Sequence
  PM F1-A10 HCDR3
RGNSGYYVMDA

SEQ ID NO: 691 - protein, 242 aa, Artificial Sequence
  PM F1-A10 HL
EVQLLESGGGLVQPGGSLRLSCAASGFTFSDFFMAWVRQAPGRGLEWVSTIVSDGGSTYYRDSVKGRFTISRDNSKNTLYLQMNSLRAEDTAVYYCARRGNSGYYVMDAWGQGTTVTVSSGGGGSGGGGSGGGGSDIQMTQSPSTLSASVGDRVTITCRASSSVTYMHWYQQKPGKAPKLLIYDTSKVASGVPSRFSGSGSGTEFTLTISSLQPDDFATYYCQQWSRNSPYTFGQGTKLEIK

SEQ ID NO: 692 - DNA, 726 bp, Artificial Sequence
  PM F1-A10 HL
gaggtgcagctgctcgagtctggtggaggcttagtgcagcctggagggtccctaagactctcctgtgcagcctcaggattcactttcagtgactttttcatggcctgggtccgccaggctccagggagggggctggagtgggtctcaaccattgtttctgatggtggtagcacttactatcgcgactccgtgaagggccgtttcactatctccagagataattcaaaaaacaccctgtacctgcaaatgaacagtctgagggctgaggacacggccgtttattactgtgcaagacgcggcaattcggggtactatgttatggatgcctggggtcaaggaactacggtcaccgtctcctcaggtggtggtggttctggcggcggcggctccggtggtggtggttctgacatccagatgactcagtctccatcaaccctgtctgcatctgtgggggacagagtcaccatcacctgccgggccagctccagtgtgacttacatgcactggtaccagcagaagccaggcaaagcccctaaattattgatttatgacacatccaaagtggcttctggagtcccaagtcgcttcagtggcagtgggtctgggaccgaatttactctcacaatcagctccctgcagcctgatgactttgccacttattactgtcagcagtggagtaggaactcaccctacacgtttgggcaggggaccaagctggaaatcaaa

SEQ ID NO: 693 - protein, 497 aa, Artificial Sequence
  PM F1-A10  HL x I2C HL
EVQLLESGGGLVQPGGSLRLSCAASGFTFSDFFMAWVRQAPGRGLEWVSTIVSDGGSTYYRDSVKGRFTISRDNSKNTLYLQMNSLRAEDTAVYYCARRGNSGYYVMDAWGQGTTVTVSSGGGGSGGGGSGGGGSDIQMTQSPSTLSASVGDRVTITCRASSSVTYMHWYQQKPGKAPKLLIYDTSKVASGVPSRFSGSGSGTEFTLTISSLQPDDFATYYCQQWSRNSPYTFGQGTKLEIKSGGGGSEVQLVESGGGLVQPGGSLKLSCAASGFTFNKYAMNWVRQAPGKGLEWVARIRSKYNNYATYYADSVKDRFTISRDDSKNTAYLQMNNLKTEDTAVYYCVRHGNFGNSYISYWAYWGQGTLVTVSSGGGGSGGGGSGGGGSQTVVTQEPSLTVSPGGTVTLTCGSSTGAVTSGNYPNWVQQKPGQAPRGLIGGTKFLAPGTPARFSGSLLGGKAALTLSGVQPEDEAEYYCVLWYSNRWVFGGGTKLTVL

SEQ ID NO: 694 - DNA, 1491 bp, Artificial Sequence
  PM F1-A10  HL x I2C HL
gaggtgcagctgctcgagtctggtggaggcttagtgcagcctggagggtccctaagactctcctgtgcagcctcaggattcactttcagtgactttttcatggcctgggtccgccaggctccagggagggggctggagtgggtctcaaccattgtttctgatggtggtagcacttactatcgcgactccgtgaagggccgtttcactatctccagagataattcaaaaaacaccctgtacctgcaaatgaacagtctgagggctgaggacacggccgtttattactgtgcaagacgcggcaattcggggtactatgttatggatgcctggggtcaaggaactacggtcaccgtctcctcaggtggtggtggttctggcggcggcggctccggtggtggtggttctgacatccagatgactcagtctccatcaaccctgtctgcatctgtgggggacagagtcaccatcacctgccgggccagctccagtgtgacttacatgcactggtaccagcagaagccaggcaaagcccctaaattattgatttatgacacatccaaagtggcttctggagtcccaagtcgcttcagtggcagtgggtctgggaccgaatttactctcacaatcagctccctgcagcctgatgactttgccacttattactgtcagcagtggagtaggaactcaccctacacgtttgggcaggggaccaagctggaaatcaaatccggaggtggtggatccgaggtgcagctggtcgagtctggaggaggattggtgcagcctggagggtcattgaaactctcatgtgcagcctctggattcaccttcaataagtacgccatgaactgggtccgccaggctccaggaaagggtttggaatgggttgctcgcataagaagtaaatataataattatgcaacatattatgccgattcagtgaaagacaggttcaccatctccagagatgattcaaaaaacactgcctatctacaaatgaacaacttgaaaactgaggacactgccgtgtactactgtgtgagacatgggaacttcggtaatagctacatatcctactgggcttactggggccaagggactctggtcaccgtctcctcaggtggtggtggttctggcggcggcggctccggtggtggtggttctcagactgttgtgactcaggaaccttcactcaccgtatcacctggtggaacagtcacactcacttgtggctcctcgactggggctgttacatctggcaactacccaaactgggtccaacaaaaaccaggtcaggcaccccgtggtctaataggtgggactaagttcctcgcccccggtactcctgccagattctcaggctccctgcttggaggcaaggctgccctcaccctctcaggggtacagccagaggatgaggcagaatattactgtgttctatggtacagcaaccgctgggtgttcggtggaggaaccaaactgactgtccta

SEQ ID NO: 695 - protein, 107 aa, Artificial Sequence
  PM 99-F1 VL
DIQMTQSPSTLSASVGDRVTITCRASSSVTYMHWYQQKPGKSPKLLIYDTSKVASGVPSRFSGSGSGTSFTLTISSLQPEDIATYYCQQWSRNSPYTFGQGTKLEIK

SEQ ID NO: 696 - DNA, 321 bp, Artificial Sequence
  PM 99-F1 VL
gacatccagatgactcagtctccatcaaccctgtctgcatctgtgggggacagagtcaccatcacctgccgtgccagctccagtgtgacttacatgcactggtaccagcagaagccaggcaaatcccctaaattattgatttatgacacatccaaagtggcttctggagtcccaagtcgcttcagtggcagtgggtctgggacctcatttactctcacaatcagctccctgcagcctgaagacattgccacttattactgtcagcagtggagtaggaactcaccctacacgtttggacaggggaccaagctggaaatcaaa

SEQ ID NO: 697 - protein, 10 aa, Artificial Sequence
  PM 99-F1 LCDR1
RASSSVTYMH

SEQ ID NO: 698 - protein, 7 aa, Artificial Sequence
  PM 99-F1 LCDR2
DTSKVAS

SEQ ID NO: 699 - protein, 10 aa, Artificial Sequence
  PM 99-F1 LCDR3
QQWSRNSPYT

SEQ ID NO: 700 - protein, 120 aa, Artificial Sequence; identical to SEQ ID NO: 686
  PM 99-F1 VH

SEQ ID NO: 701 - DNA, 360 bp, Artificial Sequence; identical to SEQ ID NO: 687
  PM 99-F1 VH

SEQ ID NO: 702 - protein, 5 aa, Artificial Sequence
  PM 99-F1 HCDR1
DFFMA

SEQ ID NO: 703 - protein, 17 aa, Artificial Sequence
  PM 99-F1 HCDR2
TIVSDGGSTYYRDSVKG

SEQ ID NO: 704 - protein, 11 aa, Artificial Sequence
  PM 99-F1 HCDR3
RGNSGYYVMDA

SEQ ID NO: 705 - protein, 242 aa, Artificial Sequence
  PM 99-F1 HL
EVQLLESGGGLVQPGGSLRLSCAASGFTFSDFFMAWVRQAPGRGLEWVSTIVSDGGSTYYRDSVKGRFTISRDNSKNTLYLQMNSLRAEDTAVYYCARRGNSGYYVMDAWGQGTTVTVSSGGGGSGGGGSGGGGSDIQMTQSPSTLSASVGDRVTITCRASSSVTYMHWYQQKPGKSPKLLIYDTSKVASGVPSRFSGSGSGTSFTLTISSLQPEDIATYYCQQWSRNSPYTFGQGTKLEIK

SEQ ID NO: 706 - DNA, 726 bp, Artificial Sequence
  PM 99-F1 HL
gaggtgcagctgctcgagtctggtggaggcttagtgcagcctggagggtccctaagactctcctgtgcagcctcaggattcactttcagtgactttttcatggcctgggtccgccaggctccagggagggggctggagtgggtctcaaccattgtttctgatggtggtagcacttactatcgcgactccgtgaagggccgtttcactatctccagagataattcaaaaaacaccctgtacctgcaaatgaacagtctgagggctgaggacacggccgtttattactgtgcaagacgcggcaattcggggtactatgttatggatgcctggggtcaaggaactacggtcaccgtctcctcaggtggtggtggttctggcggcggcggctccggtggtggcggttctgacatccagatgactcagtctccatcaaccctgtctgcatctgtgggggacagagtcaccatcacctgccgtgccagctccagtgtgacttacatgcactggtaccagcagaagccaggcaaatcccctaaattattgatttatgacacatccaaagtggcttctggagtcccaagtcgcttcagtggcagtgggtctgggacctcatttactctcacaatcagctccctgcagcctgaagacattgccacttattactgtcagcagtggagtaggaactcaccctacacgtttggacaggggaccaagctggaaatcaaa

SEQ ID NO: 707 - protein, 497 aa, Artificial Sequence
  PM 99-F1  HL x I2C HL
EVQLLESGGGLVQPGGSLRLSCAASGFTFSDFFMAWVRQAPGRGLEWVSTIVSDGGSTYYRDSVKGRFTISRDNSKNTLYLQMNSLRAEDTAVYYCARRGNSGYYVMDAWGQGTTVTVSSGGGGSGGGGSGGGGSDIQMTQSPSTLSASVGDRVTITCRASSSVTYMHWYQQKPGKSPKLLIYDTSKVASGVPSRFSGSGSGTSFTLTISSLQPEDIATYYCQQWSRNSPYTFGQGTKLEIKSGGGGSEVQLVESGGGLVQPGGSLKLSCAASGFTFNKYAMNWVRQAPGKGLEWVARIRSKYNNYATYYADSVKDRFTISRDDSKNTAYLQMNNLKTEDTAVYYCVRHGNFGNSYISYWAYWGQGTLVTVSSGGGGSGGGGSGGGGSQTVVTQEPSLTVSPGGTVTLTCGSSTGAVTSGNYPNWVQQKPGQAPRGLIGGTKFLAPGTPARFSGSLLGGKAALTLSGVQPEDEAEYYCVLWYSNRWVFGGGTKLTVL

SEQ ID NO: 708 - DNA, 1491 bp, Artificial Sequence
  PM 99-F1  HL x I2C HL
gaggtgcagctgctcgagtctggtggaggcttagtgcagcctggagggtccctaagactctcctgtgcagcctcaggattcactttcagtgactttttcatggcctgggtccgccaggctccagggagggggctggagtgggtctcaaccattgtttctgatggtggtagcacttactatcgcgactccgtgaagggccgtttcactatctccagagataattcaaaaaacaccctgtacctgcaaatgaacagtctgagggctgaggacacggccgtttattactgtgcaagacgcggcaattcggggtactatgttatggatgcctggggtcaaggaactacggtcaccgtctcctcaggtggtggtggttctggcggcggcggctccggtggtggcggttctgacatccagatgactcagtctccatcaaccctgtctgcatctgtgggggacagagtcaccatcacctgccgtgccagctccagtgtgacttacatgcactggtaccagcagaagccaggcaaatcccctaaattattgatttatgacacatccaaagtggcttctggagtcccaagtcgcttcagtggcagtgggtctgggacctcatttactctcacaatcagctccctgcagcctgaagacattgccacttattactgtcagcagtggagtaggaactcaccctacacgtttggacaggggaccaagctggaaatcaaatccggaggtggtggatccgaggtgcagctggtcgagtctggaggaggattggtgcagcctggagggtcattgaaactctcatgtgcagcctctggattcaccttcaataagtacgccatgaactgggtccgccaggctccaggaaagggtttggaatgggttgctcgcataagaagtaaatataataattatgcaacatattatgccgattcagtgaaagacaggttcaccatctccagagatgattcaaaaaacactgcctatctacaaatgaacaacttgaaaactgaggacactgccgtgtactactgtgtgagacatgggaacttcggtaatagctacatatcctactgggcttactggggccaagggactctggtcaccgtctcctcaggtggtggtggttctggcggcggcggctccggtggtggtggttctcagactgttgtgactcaggaaccttcactcaccgtatcacctggtggaacagtcacactcacttgtggctcctcgactggggctgttacatctggcaactacccaaactgggtccaacaaaaaccaggtcaggcaccccgtggtctaataggtgggactaagttcctcgcccccggtactcctgccagattctcaggctccctgcttggaggcaaggctgccctcaccctctcaggggtacagccagaggatgaggcagaatattactgtgttctatggtacagcaaccgctgggtgttcggtggaggaaccaaactgactgtccta

SEQ ID NO: 709 - protein, 107 aa, Artificial Sequence
  PM 99-F5 VL
DIQMTQSPSTLSASVGDRVTITCRASSSVTYMHWYQQKPGKSPKLLIYDTSKVASGVPSRFSGSGSGTEFTLTISSLQPDDFATYYCQQWSRNSPYTFGQGTKLEIK

SEQ ID NO: 710 - DNA, 321 bp, Artificial Sequence
  PM 99-F5 VL
gacatccagatgactcagtctccatcaaccctgtctgcatctgtgggggacagagtcaccatcacctgccgtgccagctccagtgtgacttacatgcactggtaccagcagaagccaggcaaatcccctaaattattgatttatgacacatccaaagtggcttctggagtcccaagtcgcttcagtggcagtgggtctgggaccgaatttactctcacaatcagctccctgcagcctgatgactttgccacttattactgtcagcagtggagtaggaactcaccctacacgtttggacaggggaccaagctggaaatcaaa

SEQ ID NO: 711 - protein, 10 aa, Artificial Sequence
  PM 99-F5 LCDR1
RASSSVTYMH

SEQ ID NO: 712 - protein, 7 aa, Artificial Sequence
  PM 99-F5 LCDR2
DTSKVAS

SEQ ID NO: 713 - protein, 10 aa, Artificial Sequence
  PM 99-F5 LCDR3
QQWSRNSPYT

SEQ ID NO: 714 - protein, 120 aa, Artificial Sequence
  PM 99-F5 VH
EVQLLESGGGLVQPGGSLKLSCAASGFTFSDFFMAWVRQAPGKGLEWVSTIVSDGGSTYYRDSVKGRFTISRDNSKNTLYLQMNSLTAEDTAIYYCAKRGNSGYYVMDAWGQGTTVTVSS

SEQ ID NO: 715 - DNA, 360 bp, Artificial Sequence
  PM 99-F5 VH
gaggtgcagctgctcgagtctggtggaggcttagtgcagcctggagggtccctaaaactctcctgtgcagcctcaggattcactttcagtgactttttcatggcctgggtccgccaggctccagggaaggggctggagtgggtctcaaccattgtttctgatggtggtagcacttactatcgcgactccgtgaagggccgtttcactatctccagagataattcaaaaaacaccctgtacctgcaaatgaacagtctgacggctgaggacacggccatttattactgtgcaaaacgcggcaattcggggtactatgttatggatgcctggggtcaaggaactacggtcaccgtctcctca

SEQ ID NO: 716 - protein, 5 aa, Artificial Sequence
  PM 99-F5 HCDR1
DFFMA

SEQ ID NO: 717 - protein, 17 aa, Artificial Sequence
  PM 99-F5 HCDR2
TIVSDGGSTYYRDSVKG

SEQ ID NO: 718 - protein, 11 aa, Artificial Sequence
  PM 99-F5 HCDR1
RGNSGYYVMDA

SEQ ID NO: 719 - protein, 242 aa, Artificial Sequence
  PM 99-F5 HL
EVQLLESGGGLVQPGGSLKLSCAASGFTFSDFFMAWVRQAPGKGLEWVSTIVSDGGSTYYRDSVKGRFTISRDNSKNTLYLQMNSLTAEDTAIYYCAKRGNSGYYVMDAWGQGTTVTVSSGGGGSGGGGSGGGGSDIQMTQSPSTLSASVGDRVTITCRASSSVTYMHWYQQKPGKSPKLLIYDTSKVASGVPSRFSGSGSGTEFTLTISSLQPDDFATYYCQQWSRNSPYTFGQGTKLEIK

SEQ ID NO: 720 - DNA, 726 bp, Artificial Sequence
  PM 99-F5 HL
gaggtgcagctgctcgagtctggtggaggcttagtgcagcctggagggtccctaaaactctcctgtgcagcctcaggattcactttcagtgactttttcatggcctgggtccgccaggctccagggaaggggctggagtgggtctcaaccattgtttctgatggtggtagcacttactatcgcgactccgtgaagggccgtttcactatctccagagataattcaaaaaacaccctgtacctgcaaatgaacagtctgacggctgaggacacggccatttattactgtgcaaaacgcggcaattcggggtactatgttatggatgcctggggtcaaggaactacggtcaccgtctcctcaggtggtggtggttctggcggcggcggctccggtggtggtggttctgacatccagatgactcagtctccatcaaccctgtctgcatctgtgggggacagagtcaccatcacctgccgtgccagctccagtgtgacttacatgcactggtaccagcagaagccaggcaaatcccctaaattattgatttatgacacatccaaagtggcttctggagtcccaagtcgcttcagtggcagtgggtctgggaccgaatttactctcacaatcagctccctgcagcctgatgactttgccacttattactgtcagcagtggagtaggaactcaccctacacgtttggacaggggaccaagctggaaatcaaa

SEQ ID NO: 721 - protein, 497 aa, Artificial Sequence
  PM 99-F5  HL x I2C HL
EVQLLESGGGLVQPGGSLKLSCAASGFTFSDFFMAWVRQAPGKGLEWVSTIVSDGGSTYYRDSVKGRFTISRDNSKNTLYLQMNSLTAEDTAIYYCAKRGNSGYYVMDAWGQGTTVTVSSGGGGSGGGGSGGGGSDIQMTQSPSTLSASVGDRVTITCRASSSVTYMHWYQQKPGKSPKLLIYDTSKVASGVPSRFSGSGSGTEFTLTISSLQPDDFATYYCQQWSRNSPYTFGQGTKLEIKSGGGGSEVQLVESGGGLVQPGGSLKLSCAASGFTFNKYAMNWVRQAPGKGLEWVARIRSKYNNYATYYADSVKDRFTISRDDSKNTAYLQMNNLKTEDTAVYYCVRHGNFGNSYISYWAYWGQGTLVTVSSGGGGSGGGGSGGGGSQTVVTQEPSLTVSPGGTVTLTCGSSTGAVTSGNYPNWVQQKPGQAPRGLIGGTKFLAPGTPARFSGSLLGGKAALTLSGVQPEDEAEYYCVLWYSNRWVFGGGTKLTVL

SEQ ID NO: 722 - protein, 107 aa, Artificial Sequence
  PM 86-F6 VL
DIQMTQSPSTLSASVGEKVTITCRASSSVTYMHWYQQKPGKAPKLLIYDTSKVASGVPSRFSGSGSGTEFTLTISSLEPEDFATYYCQQWSRNSPYTFGQGTKLEIK

SEQ ID NO: 723 - DNA, 321 bp, Artificial Sequence
  PM 86-F6 VL
gacatccagatgactcagtctccatcaaccctgtctgcatctgtgggggagaaagtcaccatcacctgccgtgccagctccagtgtgacttacatgcactggtaccagcagaagccaggcaaagcccctaaattattgatttatgacacatccaaagtggcttctggagtcccaagtcgcttcagtggcagtgggtctgggaccgaatttactctcacaatcagctccctggagcctgaagactttgccacttattactgtcagcagtggagtaggaactcaccctacacgtttggacaggggaccaagctggaaatcaaa

SEQ ID NO: 724 - protein, 10 aa, Artificial Sequence
  PM 86-F6 LCDR1
RASSSVTYMH

SEQ ID NO: 725 - protein, 7 aa, Artificial Sequence
  PM 86-F6 LCDR2
DTSKVAS

SEQ ID NO: 726 - protein, 10 aa, Artificial Sequence
  PM 86-F6 LCDR3
QQWSRNSPYT

SEQ ID NO: 727 - protein, 120 aa, Artificial Sequence
  PM 86-F6 VH
EVQLLESGGGLVQPGGSLKLSCAASGFTFSDFFMAWVRQAPGKGLEWVATIVSDGGSTYYRDSVKGRFTISRDNSKNTLYLQMDSLTSEDTAIYYCARRGNSGYYVMDAWGQGTTVTVSS

SEQ ID NO: 728 - DNA, 360 bp, Artificial Sequence
  PM 86-F6 VH
gaggtgcagctgctcgagtctggtggaggcttagtgcagcctggagggtccctaaaactctcctgtgcagcctcaggattcactttcagtgactttttcatggcctgggtccgccaggctccagggaaggggctggagtgggtcgcaaccattgtttctgatggtggtagcacttactatcgcgactccgtgaagggccgtttcactatttccagagataattcaaaaaacaccctgtacctgcaaatggacagtctgacgtctgaggacacggccatttattactgtgcaagacgcggcaattcggggtactatgttatggatgcctggggtcaaggaactacggtcaccgtctcctca

SEQ ID NO: 729 - protein, 5 aa, Artificial Sequence
  PM 86-F6 HCDR1
DFFMA

SEQ ID NO: 730 - protein, 17 aa, Artificial Sequence
  PM 86-F6 HCDR2
TIVSDGGSTYYRDSVKG

SEQ ID NO: 731 - protein, 11 aa, Artificial Sequence
  PM 86-F6 HCDR3
RGNSGYYVMDA

SEQ ID NO: 732 - protein, 242 aa, Artificial Sequence
  PM 86-F6 HL
EVQLLESGGGLVQPGGSLKLSCAASGFTFSDFFMAWVRQAPGKGLEWVATIVSDGGSTYYRDSVKGRFTISRDNSKNTLYLQMDSLTSEDTAIYYCARRGNSGYYVMDAWGQGTTVTVSSGGGGSGGGGSGGGGSDIQMTQSPSTLSASVGEKVTITCRASSSVTYMHWYQQKPGKAPKLLIYDTSKVASGVPSRFSGSGSGTEFTLTISSLEPEDFATYYCQQWSRNSPYTFGQGTKLEIK

SEQ ID NO: 733 - DNA, 726 bp, Artificial Sequence
  PM 86-F6 HL
gaggtgcagctgctcgagtctggtggaggcttagtgcagcctggagggtccctaaaactctcctgtgcagcctcaggattcactttcagtgactttttcatggcctgggtccgccaggctccagggaaggggctggagtgggtcgcaaccattgtttctgatggtggtagcacttactatcgcgactccgtgaagggccgtttcactatttccagagataattcaaaaaacaccctgtacctgcaaatggacagtctgacgtctgaggacacggccatttattactgtgcaagacgcggcaattcggggtactatgttatggatgcctggggtcaaggaactacggtcaccgtctcctcaggtggtggtggttctggcggcggcggctccggtggtggtggttctgacatccagatgactcagtctccatcaaccctgtctgcatctgtgggggagaaagtcaccatcacctgccgtgccagctccagtgtgacttacatgcactggtaccagcagaagccaggcaaagcccctaaattattgatttatgacacatccaaagtggcttctggagtcccaagtcgcttcagtggcagtgggtctgggaccgaatttactctcacaatcagctccctggagcctgaagactttgccacttattactgtcagcagtggagtaggaactcaccctacacgtttggacaggggaccaagctggaaatcaaa

SEQ ID NO: 734 - protein, 497 aa, Artificial Sequence
  PM 86-F6  HL x I2C HL
EVQLLESGGGLVQPGGSLKLSCAASGFTFSDFFMAWVRQAPGKGLEWVATIVSDGGSTYYRDSVKGRFTISRDNSKNTLYLQMDSLTSEDTAIYYCARRGNSGYYVMDAWGQGTTVTVSSGGGGSGGGGSGGGGSDIQMTQSPSTLSASVGEKVTITCRASSSVTYMHWYQQKPGKAPKLLIYDTSKVASGVPSRFSGSGSGTEFTLTISSLEPEDFATYYCQQWSRNSPYTFGQGTKLEIKSGGGGSEVQLVESGGGLVQPGGSLKLSCAASGFTFNKYAMNWVRQAPGKGLEWVARIRSKYNNYATYYADSVKDRFTISRDDSKNTAYLQMNNLKTEDTAVYYCVRHGNFGNSYISYWAYWGQGTLVTVSSGGGGSGGGGSGGGGSQTVVTQEPSLTVSPGGTVTLTCGSSTGAVTSGNYPNWVQQKPGQAPRGLIGGTKFLAPGTPARFSGSLLGGKAALTLSGVQPEDEAEYYCVLWYSNRWVFGGGTKLTVL

SEQ ID NO: 735 - DNA, 1491 bp, Artificial Sequence
  PM 86-F6  HL x I2C HL
gaggtgcagctgctcgagtctggtggaggcttagtgcagcctggagggtccctaaaactctcctgtgcagcctcaggattcactttcagtgactttttcatggcctgggtccgccaggctccagggaaggggctggagtgggtcgcaaccattgtttctgatggtggtagcacttactatcgcgactccgtgaagggccgtttcactatttccagagataattcaaaaaacaccctgtacctgcaaatggacagtctgacgtctgaggacacggccatttattactgtgcaagacgcggcaattcggggtactatgttatggatgcctggggtcaaggaactacggtcaccgtctcctcaggtggtggtggttctggcggcggcggctccggtggtggtggttctgacatccagatgactcagtctccatcaaccctgtctgcatctgtgggggagaaagtcaccatcacctgccgtgccagctccagtgtgacttacatgcactggtaccagcagaagccaggcaaagcccctaaattattgatttatgacacatccaaagtggcttctggagtcccaagtcgcttcagtggcagtgggtctgggaccgaatttactctcacaatcagctccctggagcctgaagactttgccacttattactgtcagcagtggagtaggaactcaccctacacgtttggacaggggaccaagctggaaatcaaatccggaggtggtggatccgaggtgcagctggtcgagtctggaggaggattggtgcagcctggagggtcattgaaactctcatgtgcagcctctggattcaccttcaataagtacgccatgaactgggtccgccaggctccaggaaagggtttggaatgggttgctcgcataagaagtaaatataataattatgcaacatattatgccgattcagtgaaagacaggttcaccatctccagagatgattcaaaaaacactgcctatctacaaatgaacaacttgaaaactgaggacactgccgtgtactactgtgtgagacatgggaacttcggtaatagctacatatcctactgggcttactggggccaagggactctggtcaccgtctcctcaggtggtggtggttctggcggcggcggctccggtggtggtggttctcagactgttgtgactcaggaaccttcactcaccgtatcacctggtggaacagtcacactcacttgtggctcctcgactggggctgttacatctggcaactacccaaactgggtccaacaaaaaccaggtcaggcaccccgtggtctaataggtgggactaagttcctcgcccccggtactcctgccagattctcaggctccctgcttggaggcaaggctgccctcaccctctcaggggtacagccagaggatgaggcagaatattactgtgttctatggtacagcaaccgctgggtgttcggtggaggaaccaaactgactgtccta

SEQ ID NO: 736 - DNA, 1491 bp, Artificial Sequence
  PM99-F5 HL-I2C HL
gaggtgcagctgctcgagtctggtggaggcttagtgcagcctggagggtccctaaaactctcctgtgcagcctcaggattcactttcagtgactttttcatggcctgggtccgccaggctccagggaaggggctggagtgggtctcaaccattgtttctgatggtggtagcacttactatcgcgactccgtgaagggccgtttcactatctccagagataattcaaaaaacaccctgtacctgcaaatgaacagtctgacggctgaggacacggccatttattactgtgcaaaacgcggcaattcggggtactatgttatggatgcctggggtcaaggaactacggtcaccgtctcctcaggtggtggtggttctggcggcggcggctccggtggtggtggttctgacatccagatgactcagtctccatcaaccctgtctgcatctgtgggggacagagtcaccatcacctgccgtgccagctccagtgtgacttacatgcactggtaccagcagaagccaggcaaatcccctaaattattgatttatgacacatccaaagtggcttctggagtcccaagtcgcttcagtggcagtgggtctgggaccgaatttactctcacaatcagctccctgcagcctgatgactttgccacttattactgtcagcagtggagtaggaactcaccctacacgtttggacaggggaccaagctggaaatcaaatccggaggtggtggatccgaggtgcagctggtcgagtctggaggaggattggtgcagcctggagggtcattgaaactctcatgtgcagcctctggattcaccttcaataagtacgccatgaactgggtccgccaggctccaggaaagggtttggaatgggttgctcgcataagaagtaaatataataattatgcaacatattatgccgattcagtgaaagacaggttcaccatctccagagatgattcaaaaaacactgcctatctacaaatgaacaacttgaaaactgaggacactgccgtgtactactgtgtgagacatgggaacttcggtaatagctacatatcctactgggcttactggggccaagggactctggtcaccgtctcctcaggtggtggtggttctggcggcggcggctccggtggtggtggttctcagactgttgtgactcaggaaccttcactcaccgtatcacctggtggaacagtcacactcacttgtggctcctcgactggggctgttacatctggcaactacccaaactgggtccaacaaaaaccaggtcaggcaccccgtggtctaataggtgggactaagttcctcgcccccggtactcctgccagattctcaggctccctgcttggaggcaaggctgccctcaccctctcaggggtacagccagaggatgaggcagaatattactgtgttctatggtacagcaaccgctgggtgttcggtggaggaaccaaactgactgtccta

SEQ ID NO: 737 - DNA, 60 bp, Artificial Sequence
  5'PM3-VH-A-XhoI
ccggatctcgagtctggcggcggactggtgaagcctggcgrgtccctgargctgtcctgt

SEQ ID NO: 738 - DNA, 60 bp, Artificial Sequence
  3'PM3-VH-B
ccagtacatgtagtagtcggagaaggtgaagccggaggcgryacaggacagcytcaggga

SEQ ID NO: 739 - DNA, 69 bp, Artificial Sequence
  5'PM3-VH-C
tactacatgtactggrtccgccagrcccctgrgaagsggctggaatgggtgkccatcatctccgacggc

SEQ ID NO: 740 - DNA, 78 bp, Artificial Sequence
  3'PM3-VH-D
ggcgttgtcccgggagatggtgaaccggcccttgatgatgtcggagtagtaggtgtagtagccgccgtcggagatgat

SEQ ID NO: 741 - DNA, 87 bp, Artificial Sequence
  5'PM3-VH-E
tcccgggacaacgccaagaacarcctgtacctgcagatgarctccctgargkccgaggacaccgccrtgtactactgcrcccggggc

SEQ ID NO: 742 - DNA, 81 bp, Artificial Sequence
  3'PM3-VH-F-BstEII
cgatacggtgaccagggtgccctggccccagtaatccatggcgccgtgtctcagcagagggaagccccgggygcagtagta

SEQ ID NO: 743 - DNA, 75 bp, Artificial Sequence
  5'PM4-VH-A-XhoI
cttgatctcgagtctggcgccgaastgrwgragcctggcgcctccgtgaagstgtcctgcaaggcctccggctac

SEQ ID NO: 744 - DNA, 75 bp, Artificial Sequence
  3'PM4-VH-B
ccattccaggccctgcycaggcsyctgccgcasccagttgatgtcgaagtaggtgaaggtgtagccggaggcctt

SEQ ID NO: 745 - DNA, 69 bp, Artificial Sequence
  5'PM4-VH-C
cagggcctggaatggatsggcggcatctcccctggcgacggcaacaccaactacaacgagaacttcaag

SEQ ID NO: 746 - DNA, 65 bp, Artificial Sequence
  3'PM4-VH-D
atgtaggcggtggagmtggacktgtctmtggtcaktgtgrccytgcccttgaagttctcgttgta

SEQ ID NO: 747 - DNA, 73 bp, Artificial Sequence
  5'PM4-VH-E
ctccaccgcctacatssagctgtcccggctgasatctgasgacaccgccgtgtactwctgcgccagggacggc

SEQ ID NO: 748 - DNA, 72 bp, Artificial Sequence
  3'PM4-VH-F-BstEII
agacacggtcaccgtggtgccctggccccaagagtccatggcgtagtaagggaagttgccgtccctggcgca

SEQ ID NO: 749 - DNA, 75 bp, Artificial Sequence
  5'PM8-VH-A-XhoI
cttgatctcgagtccggcsctgagstgrwgaagcctggcgcctccgtgaagrtgtcctgcaaggcctccggctac

SEQ ID NO: 750 - DNA, 78 bp, Artificial Sequence
  3'PM8-VH-B
ccattccagcmsctggccgggtkyctgtytcacccagtgcatcacgtagccggtgaaggtgtagccggaggccttgca

SEQ ID NO: 751 - DNA, 75 bp, Artificial Sequence
  5'PM8-VH-C
cccggccagskgctggaatggatsggctacatcaacccttacaacgacgtgacccggtacaacggcaagttcaag

SEQ ID NO: 752 - DNA, 69 bp, Artificial Sequence
  3'PM8-VH-D
ttccatgtaggcggtggaggmgkacktgtckctggtaakggtgrctytgcccttgaacttgccgttgta

SEQ ID NO: 753 - DNA, 69 bp, Artificial Sequence
  5'PM8-VH-E
tccaccgcctacatggaactgtccrgcctgasgtctgaggacaccgccgtgtactactgcgccaggggc

SEQ ID NO: 754 - DNA, 72 bp, Artificial Sequence
  3'PM8-VH-F-BstEII
cgatacggtgaccagagtgcctctgccccaggagtcgaagtagtaccagttctcgcccctggcgcagtagta

SEQ ID NO: 755 - DNA, 66 bp, Artificial Sequence
  5'PM3-VL-A-SacI
cttgatgagctccagatgacccagtcccccarstycmtgtccrcctccgtgggcgacagagtgacc

SEQ ID NO: 756 - DNA, 78 bp, Artificial Sequence
  3'PM3-VL-B
gccgggcttctgctgawaccaggccacgttggtgtccacgttctgggaggccttgcaggtgayggtcactctgtcgcc

SEQ ID NO: 757 - DNA, 60 bp, Artificial Sequence
  5'PM3-VL-C
cagcagaagcccggcmagkcccctaagkccctgatctactccgcctcctaccggtactct

SEQ ID NO: 758 - DNA, 66 bp, Artificial Sequence
  3'PM3-VL-D
cagggtgaagtcggtgccggacycggagccggagaaccggkmaggcacgycagagtaccggtagga

SEQ ID NO: 759 - DNA, 72 bp, Artificial Sequence
  5'PM3-VL-E
accgacttcaccctgaccatctccarcstgcagyctgaggacytcgccrmgtactwctgccagcagtacgac

SEQ ID NO: 760 - DNA, 78 bp, Artificial Sequence
  3'PM3-VL-F-BsiWI/SpeI
cgagtaactagtcgtacgcttgatttccagcttggtccctccgccgaaggtgtaagggtaggagtcgtactgctggca

SEQ ID NO: 761 - DNA, 78 bp, Artificial Sequence
  5'PM4-VL-A-SacI
cttgatgagctcgtgatgacccagtcccccctgtccctgcctgtgaycctgggcsamcmggcctccatctcctgccgg

SEQ ID NO: 762 - DNA, 69 bp, Artificial Sequence
  3'PM4-VL-B
aaaccagtgcaggtaggtattgccgttggagtgcaccagggactgggaggaccggcaggagatggaggc

SEQ ID NO: 763 - DNA, 72 bp, Artificial Sequence
  5'PM4-VL-C
acctacctgcactggtttcwgcagargcctggccagtcccctargckgctgatctacaccgtgtccaaccgg

SEQ ID NO: 764 - DNA, 72 bp, Artificial Sequence
  3'PM4-VL-D
cagggtgaagtcggtgccggagccggagccagagaacctgtcaggcacgccggagaaccggttggacacggt

SEQ ID NO: 765 - DNA, 75 bp, Artificial Sequence
  5'PM4-VL-E
ggcaccgacttcaccctgaagatctcccgggtggaggccgaagatstgggcgtgtactwttgctcccagtccacc

SEQ ID NO: 766 - DNA, 75 bp, Artificial Sequence
  3'PM4-VL-F-BsiWI/SpeI
actcagactagtcgtacgcttgatttccagcttggtccctccgccgaaggtaggcacgtgggtggactgggagca

SEQ ID NO: 767 - DNA, 78 bp, Artificial Sequence
  5'PM8-VL-A-SacI
cttgatgagctcgtgatgacccagtctccasyctccctgsctgtgactctgggccagcsggcctccatctcttgccgg

SEQ ID NO: 768 - DNA, 63 bp, Artificial Sequence
  3'PM8-VL-B
ccagtgcatgaaggtgttgtcgtaggagtcgatggactcggaggcccggcaagagatggaggc

SEQ ID NO: 769 - DNA, 75 bp, Artificial Sequence
  5'PM8-VL-C
accttcatgcactggtwtcagcagargcctggccagyctcctmrcckgctgatctwccgggcctctatcctggaa

SEQ ID NO: 770 - DNA, 72 bp, Artificial Sequence
  3'PM8-VL-D
cagggtgaagtcggtgccggagccagagccggagaaccggkcagggaygccggattccaggatagaggcccg

SEQ ID NO: 771 - DNA, 66 bp, Artificial Sequence
  5'PM8-VL-E
accgacttcaccctgamaatctmccstgtggaggccgasgacgtggscryctactactgccaccag

SEQ ID NO: 772 - DNA, 84 bp, Artificial Sequence
  3'PM8-VL-F-BsiWI/SpeI
actcagactagtcgtacgcttgatttccagcttggtccctccgccgaaggtgtaagggtcctcgatggactggtggcagtagta

SEQ ID NO: 773 - protein, 120 aa, Artificial Sequence
  PM84D7-H
QVQLVQSGAEVKKPGASVKLSCKASGYTFTYFDINWVRQAPEQGLEWMGGISPGDGNTNYNENFKGRVTMTIDTSSSTAYIELSRLTSDDTAVYYCARDGNFPYYAMDSWGQGTTVTVSS

SEQ ID NO: 774 - protein, 5 aa, Artificial Sequence
  PM84D7-HCDR1
YFDIN

SEQ ID NO: 775 - protein, 17 aa, Artificial Sequence
  PM84D7-HCDR2
GISPGDGNTNYNENFKG

SEQ ID NO: 776 - protein, 11 aa, Artificial Sequence
  PM84D7-HCDR3
DGNFPYYAMDS

SEQ ID NO: 777 - DNA, 360 bp, Artificial Sequence
  PM84D7-H
caggtgcagctggtccagtctggcgccgaagtgaagaagcctggcgcctccgtgaagctgtcctgcaaggcctccggctacaccttcacctacttcgacatcaactgggtgcggcaggcgcctgagcagggcctggaatggatgggcggcatctcccctggcgacggcaacaccaactacaacgagaacttcaagggcagggtcacaatgaccatagacacgtccagctccaccgcctacatcgagctgtcccggctgacatctgacgacaccgccgtgtactactgcgccagggacggcaacttcccttactacgccatggactcttggggccagggcaccacggtgaccgtctcctca

SEQ ID NO: 778 - protein, 111 aa, Artificial Sequence
  PM84D7-L
DIVMTQSPLSLPVTLGQQASISCRSSQSLVHSNGNTYLHWFQQRPGQSPKLLIYTVSNRFSGVPDRFSGSGSGTDFTLKISRVEAEDVGVYYCSQSTHVPTFGGGTKLEIK

SEQ ID NO: 779 - protein, 16 aa, Artificial Sequence
  PM84D7-LCDR1
RSSQSLVHSNGNTYLH

SEQ ID NO: 780 - protein, 7 aa, Artificial Sequence
  PM84D7-LCDR2
TVSNRFS

SEQ ID NO: 781 - protein, 8 aa, Artificial Sequence
  PM84D7-LCDR3
SQSTHVPT

SEQ ID NO: 782 - DNA, 333 bp, Artificial Sequence
  PM84D7-L
gacatcgtgatgacccagtcccccctgtccctgcctgtgaccctgggccaacaggcctccatctcctgccggtcctcccagtccctggtgcactccaacggcaatacctacctgcactggtttcagcagaggcctggccagtcccctaagctgctgatctacaccgtgtccaaccggttctccggcgtgcctgacaggttctctggctccggctccggcaccgacttcaccctgaagatctcccgggtggaggccgaagatgtgggcgtgtactattgctcccagtccacccacgtgcctaccttcggcggagggaccaagctggaaatcaag

SEQ ID NO: 783 - protein, 246 aa, Artificial Sequence
  PM84D7-HL
QVQLVQSGAEVKKPGASVKLSCKASGYTFTYFDINWVRQAPEQGLEWMGGISPGDGNTNYNENFKGRVTMTIDTSSSTAYIELSRLTSDDTAVYYCARDGNFPYYAMDSWGQGTTVTVSSGGGGSGGGGSGGGGSDIVMTQSPLSLPVTLGQQASISCRSSQSLVHSNGNTYLHWFQQRPGQSPKLLIYTVSNRFSGVPDRFSGSGSGTDFTLKISRVEAEDVGVYYCSQSTHVPTFGGGTKLEIK

SEQ ID NO: 784 - DNA, 738 bp, Artificial Sequence
  PM84D7-HL
caggtgcagctggtccagtctggcgccgaagtgaagaagcctggcgcctccgtgaagctgtcctgcaaggcctccggctacaccttcacctacttcgacatcaactgggtgcggcaggcgcctgagcagggcctggaatggatgggcggcatctcccctggcgacggcaacaccaactacaacgagaacttcaagggcagggtcacaatgaccatagacacgtccagctccaccgcctacatcgagctgtcccggctgacatctgacgacaccgccgtgtactactgcgccagggacggcaacttcccttactacgccatggactcttggggccagggcaccacggtgaccgtctcctcaggtggtggtggttctggcggcggcggctccggtggtggtggttctgacatcgtgatgacccagtcccccctgtccctgcctgtgaccctgggccaacaggcctccatctcctgccggtcctcccagtccctggtgcactccaacggcaatacctacctgcactggtttcagcagaggcctggccagtcccctaagctgctgatctacaccgtgtccaaccggttctccggcgtgcctgacaggttctctggctccggctccggcaccgacttcaccctgaagatctcccgggtggaggccgaagatgtgggcgtgtactattgctcccagtccacccacgtgcctaccttcggcggagggaccaagctggaaatcaag

SEQ ID NO: 785 - protein, 501 aa, Artificial Sequence
  PM84D7 HL x I2C HL
QVQLVQSGAEVKKPGASVKLSCKASGYTFTYFDINWVRQAPEQGLEWMGGISPGDGNTNYNENFKGRVTMTIDTSSSTAYIELSRLTSDDTAVYYCARDGNFPYYAMDSWGQGTTVTVSSGGGGSGGGGSGGGGSDIVMTQSPLSLPVTLGQQASISCRSSQSLVHSNGNTYLHWFQQRPGQSPKLLIYTVSNRFSGVPDRFSGSGSGTDFTLKISRVEAEDVGVYYCSQSTHVPTFGGGTKLEIKSGGGGSEVQLVESGGGLVQPGGSLKLSCAASGFTFNKYAMNWVRQAPGKGLEWVARIRSKYNNYATYYADSVKDRFTISRDDSKNTAYLQMNNLKTEDTAVYYCVRHGNFGNSYISYWAYWGQGTLVTVSSGGGGSGGGGSGGGGSQTVVTQEPSLTVSPGGTVTLTCGSSTGAVTSGNYPNWVQQKPGQAPRGLIGGTKFLAPGTPARFSGSLLGGKAALTLSGVQPEDEAEYYCVLWYSNRWVFGGGTKLTVL

SEQ ID NO: 786 - DNA, 1503 bp, Artificial Sequence
  PM84D7 HL x I2C HL
caggtgcagctggtccagtctggcgccgaagtgaagaagcctggcgcctccgtgaagctgtcctgcaaggcctccggctacaccttcacctacttcgacatcaactgggtgcggcaggcgcctgagcagggcctggaatggatgggcggcatctcccctggcgacggcaacaccaactacaacgagaacttcaagggcagggtcacaatgaccatagacacgtccagctccaccgcctacatcgagctgtcccggctgacatctgacgacaccgccgtgtactactgcgccagggacggcaacttcccttactacgccatggactcttggggccagggcaccacggtgaccgtctcctcaggtggtggtggttctggcggcggcggctccggtggtggtggttctgacatcgtgatgacccagtcccccctgtccctgcctgtgaccctgggccaacaggcctccatctcctgccggtcctcccagtccctggtgcactccaacggcaatacctacctgcactggtttcagcagaggcctggccagtcccctaagctgctgatctacaccgtgtccaaccggttctccggcgtgcctgacaggttctctggctccggctccggcaccgacttcaccctgaagatctcccgggtggaggccgaagatgtgggcgtgtactattgctcccagtccacccacgtgcctaccttcggcggagggaccaagctggaaatcaagtccggaggtggtggatccgaggtgcagctggtcgagtctggaggaggattggtgcagcctggagggtcattgaaactctcatgtgcagcctctggattcaccttcaataagtacgccatgaactgggtccgccaggctccaggaaagggtttggaatgggttgctcgcataagaagtaaatataataattatgcaacatattatgccgattcagtgaaagacaggttcaccatctccagagatgattcaaaaaacactgcctatctacaaatgaacaacttgaaaactgaggacactgccgtgtactactgtgtgagacatgggaacttcggtaatagctacatatcctactgggcttactggggccaagggactctggtcaccgtctcctcaggtggtggtggttctggcggcggcggctccggtggtggtggttctcagactgttgtgactcaggaaccttcactcaccgtatcacctggtggaacagtcacactcacttgtggctcctcgactggggctgttacatctggcaactacccaaactgggtccaacaaaaaccaggtcaggcaccccgtggtctaataggtgggactaagttcctcgcccccggtactcctgccagattctcaggctccctgcttggaggcaaggctgccctcaccctctcaggggtacagccagaggatgaggcagaatattactgtgttctatggtacagcaaccgctgggtgttcggtggaggaaccaaactgactgtccta

SEQ ID NO: 787 - protein, 121 aa, Artificial Sequence
  PM76A9-H
QVQLVESGGGLVKPGGSLRLSCAASGFTFSDYYMYWVRQAPGKGLEWVAIISDGGYYTYYSDIIKGRFTISRDNAKNNLYLQMNSLRAEDTAVYYCARGFPLLRHGAMDYWGQGTLVTVSS

SEQ ID NO: 788 - protein, 5 aa, Artificial Sequence
  PM76A9-HCDR1
DYYMY

SEQ ID NO: 789 - protein, 17 aa, Artificial Sequence
  PM76A9-HCDR2
IISDGGYYTYYSDIIKG

SEQ ID NO: 790 - protein, 12 aa, Artificial Sequence
  PM76A9-HCDR3
GFPLLRHGAMDY

SEQ ID NO: 791 - DNA, 363 bp, Artificial Sequence
  PM76A9-H
caggtgcagctggtcgagtctggcggcggactggtgaagcctggcgggtccctgaggctgtcctgtgccgcctccggcttcaccttctccgactactacatgtactgggtccgccaggcccctgggaaggggctggaatgggtggccatcatctccgacggcggctactacacctactactccgacatcatcaagggccggttcaccatctcccgggacaacgccaagaacaatctgtacctgcagatgaactccctgagggccgaggacaccgccgtgtactactgcgcccggggcttccctctgctgagacacggcgccatggattactggggccagggcaccctggtcaccgtctcctca

SEQ ID NO: 792 - protein, 107 aa, Artificial Sequence
  PM76A9-L
DIQMTQSPSSLSASVGDRVTITCKASQNVDTNVAWYQQKPGQAPKSLIYSASYRYSDVPSRFSGSASGTDFTLTISSVQSEDFATYYCQQYDSYPYTFGGGTKLEIK

SEQ ID NO: 793 - protein, 11 aa, Artificial Sequence
  PM76A9-LCDR1
KASQNVDTNVA

SEQ ID NO: 794 - protein, 7 aa, Artificial Sequence
  PM76A9-LCDR2
SASYRYS

SEQ ID NO: 795 - protein, 9 aa, Artificial Sequence
  PM76A9-LCDR3
QQYDSYPYT

SEQ ID NO: 796 - DNA, 321 bp, Artificial Sequence
  PM76A9-L
gacatccagatgacccagtcccccagctccctgtccgcctccgtgggcgacagagtgaccatcacctgcaaggcctcccagaacgtggacaccaacgtggcctggtatcagcagaagcccggccaggcccctaagtccctgatctactccgcctcctaccggtactctgacgtgccttcccggttctccggctccgcgtccggcaccgacttcaccctgaccatctccagcgtgcagtctgaggacttcgccacgtactactgccagcagtacgactcctacccttacaccttcggcggagggaccaagctggaaatcaag

SEQ ID NO: 797 - protein, 243 aa, Artificial Sequence
  PM76A9-HL
QVQLVESGGGLVKPGGSLRLSCAASGFTFSDYYMYWVRQAPGKGLEWVAIISDGGYYTYYSDIIKGRFTISRDNAKNNLYLQMNSLRAEDTAVYYCARGFPLLRHGAMDYWGQGTLVTVSSGGGGSGGGGSGGGGSDIQMTQSPSSLSASVGDRVTITCKASQNVDTNVAWYQQKPGQAPKSLIYSASYRYSDVPSRFSGSASGTDFTLTISSVQSEDFATYYCQQYDSYPYTFGGGTKLEIK

SEQ ID NO: 798 - DNA, 729 bp, Artificial Sequence
  PM76A9-HL
caggtgcagctggtcgagtctggcggcggactggtgaagcctggcgggtccctgaggctgtcctgtgccgcctccggcttcaccttctccgactactacatgtactgggtccgccaggcccctgggaaggggctggaatgggtggccatcatctccgacggcggctactacacctactactccgacatcatcaagggccggttcaccatctcccgggacaacgccaagaacaatctgtacctgcagatgaactccctgagggccgaggacaccgccgtgtactactgcgcccggggcttccctctgctgagacacggcgccatggattactggggccagggcaccctggtcaccgtctcctcaggtggtggtggttctggcggcggcggctccggtggtggtggttctgacatccagatgacccagtcccccagctccctgtccgcctccgtgggcgacagagtgaccatcacctgcaaggcctcccagaacgtggacaccaacgtggcctggtatcagcagaagcccggccaggcccctaagtccctgatctactccgcctcctaccggtactctgacgtgccttcccggttctccggctccgcgtccggcaccgacttcaccctgaccatctccagcgtgcagtctgaggacttcgccacgtactactgccagcagtacgactcctacccttacaccttcggcggagggaccaagctggaaatcaag

SEQ ID NO: 799 - protein, 498 aa, Artificial Sequence
  PM76A9 HL x I2C HL
QVQLVESGGGLVKPGGSLRLSCAASGFTFSDYYMYWVRQAPGKGLEWVAIISDGGYYTYYSDIIKGRFTISRDNAKNNLYLQMNSLRAEDTAVYYCARGFPLLRHGAMDYWGQGTLVTVSSGGGGSGGGGSGGGGSDIQMTQSPSSLSASVGDRVTITCKASQNVDTNVAWYQQKPGQAPKSLIYSASYRYSDVPSRFSGSASGTDFTLTISSVQSEDFATYYCQQYDSYPYTFGGGTKLEIKSGGGGSEVQLVESGGGLVQPGGSLKLSCAASGFTFNKYAMNWVRQAPGKGLEWVARIRSKYNNYATYYADSVKDRFTISRDDSKNTAYLQMNNLKTEDTAVYYCVRHGNFGNSYISYWAYWGQGTLVTVSSGGGGSGGGGSGGGGSQTVVTQEPSLTVSPGGTVTLTCGSSTGAVTSGNYPNWVQQKPGQAPRGLIGGTKFLAPGTPARFSGSLLGGKAALTLSGVQPEDEAEYYCVLWYSNRWVFGGGTKLTVL

SEQ ID NO: 800 - DNA, 1494 bp, Artificial Sequence
  PM76A9 HL x I2C HL
caggtgcagctggtcgagtctggcggcggactggtgaagcctggcgggtccctgaggctgtcctgtgccgcctccggcttcaccttctccgactactacatgtactgggtccgccaggcccctgggaaggggctggaatgggtggccatcatctccgacggcggctactacacctactactccgacatcatcaagggccggttcaccatctcccgggacaacgccaagaacaatctgtacctgcagatgaactccctgagggccgaggacaccgccgtgtactactgcgcccggggcttccctctgctgagacacggcgccatggattactggggccagggcaccctggtcaccgtctcctcaggtggtggtggttctggcggcggcggctccggtggtggtggttctgacatccagatgacccagtcccccagctccctgtccgcctccgtgggcgacagagtgaccatcacctgcaaggcctcccagaacgtggacaccaacgtggcctggtatcagcagaagcccggccaggcccctaagtccctgatctactccgcctcctaccggtactctgacgtgccttcccggttctccggctccgcgtccggcaccgacttcaccctgaccatctccagcgtgcagtctgaggacttcgccacgtactactgccagcagtacgactcctacccttacaccttcggcggagggaccaagctggaaatcaagtccggaggtggtggatccgaggtgcagctggtcgagtctggaggaggattggtgcagcctggagggtcattgaaactctcatgtgcagcctctggattcaccttcaataagtacgccatgaactgggtccgccaggctccaggaaagggtttggaatgggttgctcgcataagaagtaaatataataattatgcaacatattatgccgattcagtgaaagacaggttcaccatctccagagatgattcaaaaaacactgcctatctacaaatgaacaacttgaaaactgaggacactgccgtgtactactgtgtgagacatgggaacttcggtaatagctacatatcctactgggcttactggggccaagggactctggtcaccgtctcctcaggtggtggtggttctggcggcggcggctccggtggtggtggttctcagactgttgtgactcaggaaccttcactcaccgtatcacctggtggaacagtcacactcacttgtggctcctcgactggggctgttacatctggcaactacccaaactgggtccaacaaaaaccaggtcaggcaccccgtggtctaataggtgggactaagttcctcgcccccggtactcctgccagattctcaggctccctgcttggaggcaaggctgccctcaccctctcaggggtacagccagaggatgaggcagaatattactgtgttctatggtacagcaaccgctgggtgttcggtggaggaaccaaactgactgtccta

SEQ ID NO: 801 - DNA, 363 bp, Artificial Sequence
  PM76A9-Hcodon optimized
caggtgcagctggtcgagtctggcggcggactggtcaagcctggcggctccctgagactgtcttgcgctgcctccggcttcaccttctccgactactacatgtactgggtccgccaggctcctggcaagggactggaatgggtggccatcatctccgacggcggctactacacctactactccgacatcatcaagggccggttcaccatctccagggacaacgctaagaacaacctgtacctgcagatgaactccctgagggccgaggacaccgccgtgtactactgcgccaggggcttcccactgctgagacacggcgccatggattactggggccagggcaccctggtcacagtgtcctct

SEQ ID NO: 802 - DNA, 321 bp, Artificial Sequence
  PM76A9-Lcodon optimized
gacatccagatgacccagtccccatcctccctgtctgcctccgtgggcgacagagtgaccatcacatgcaaggcctcccagaacgtggacaccaacgtggcatggtatcagcagaagccaggccaggcccctaagtccctgatctactctgcctcctaccggtactccgacgtgccctccaggttctctggctccgcctctggcaccgacttcaccctgaccatctcttccgtgcagtccgaggacttcgctacctactactgccagcagtacgactcctacccttacaccttcggcggaggcaccaagctggaaatcaag

SEQ ID NO: 803 - DNA, 729 bp, Artificial Sequence
  PM76A9-HLcodon optimized
caggtgcagctggtcgagtctggcggcggactggtcaagcctggcggctccctgagactgtcttgcgctgcctccggcttcaccttctccgactactacatgtactgggtccgccaggctcctggcaagggactggaatgggtggccatcatctccgacggcggctactacacctactactccgacatcatcaagggccggttcaccatctccagggacaacgctaagaacaacctgtacctgcagatgaactccctgagggccgaggacaccgccgtgtactactgcgccaggggcttcccactgctgagacacggcgccatggattactggggccagggcaccctggtcacagtgtcctctggcggaggcggaagtggaggcggaggaagcggaggcggcggatccgacatccagatgacccagtccccatcctccctgtctgcctccgtgggcgacagagtgaccatcacatgcaaggcctcccagaacgtggacaccaacgtggcatggtatcagcagaagccaggccaggcccctaagtccctgatctactctgcctcctaccggtactccgacgtgccctccaggttctctggctccgcctctggcaccgacttcaccctgaccatctcttccgtgcagtccgaggacttcgctacctactactgccagcagtacgactcctacccttacaccttcggcggaggcaccaagctggaaatcaag

SEQ ID NO: 804 - DNA, 1494 bp, Artificial Sequence
  PM76A9 HL x I2C HL  codon optimized
caggtgcagctggtcgagtctggcggcggactggtcaagcctggcggctccctgagactgtcttgcgctgcctccggcttcaccttctccgactactacatgtactgggtccgccaggctcctggcaagggactggaatgggtggccatcatctccgacggcggctactacacctactactccgacatcatcaagggccggttcaccatctccagggacaacgctaagaacaacctgtacctgcagatgaactccctgagggccgaggacaccgccgtgtactactgcgccaggggcttcccactgctgagacacggcgccatggattactggggccagggcaccctggtcacagtgtcctctggcggaggcggaagtggaggcggaggaagcggaggcggcggatccgacatccagatgacccagtccccatcctccctgtctgcctccgtgggcgacagagtgaccatcacatgcaaggcctcccagaacgtggacaccaacgtggcatggtatcagcagaagccaggccaggcccctaagtccctgatctactctgcctcctaccggtactccgacgtgccctccaggttctctggctccgcctctggcaccgacttcaccctgaccatctcttccgtgcagtccgaggacttcgctacctactactgccagcagtacgactcctacccttacaccttcggcggaggcaccaagctggaaatcaagtccggcggagggggctctgaagtgcagctggtggaaagcggagggggactggtgcagcccgggggaagtctgaagctgtcctgtgccgccagcggctttaccttcaacaagtacgccatgaattgggtccgacaggccccagggaaaggcctggaatgggtggcacggatccggtccaagtacaacaactacgccacctactacgctgactccgtgaaggacagattcaccatcagccgggacgactctaagaacaccgcctatctgcagatgaacaacctgaaaaccgaggatacagctgtgtactattgtgtgcggcacggcaacttcggcaactcctacatctcctactgggcctattggggacagggaacactggtcaccgtgtctagcggaggtggcggaagtgggggaggcggatctggcggtggcggatcccagaccgtggtcacccaggaaccttccctgaccgtctccccaggcggcaccgtgaccctgacctgtggctcctctaccggcgctgtgacctccggcaactaccctaactgggtgcagcagaaacccggacaggctcctagaggcctgatcggcggcaccaagtttctggcccctggcacccctgccagattctccggctccctgctgggaggcaaggccgctctgaccctgtctggcgtgcagcctgaggacgaggccgagtactactgtgtgctgtggtactccaacagatgggtgttcggaggcggcacaaagctgaccgtgctg

SEQ ID NO: 805 - protein, 121 aa, Artificial Sequence
  PM76B10-H
QVQLVESGGGLVKPGESLRLSCAASGFTFSDYYMYWVRQAPGKGLEWVAIISDGGYYTYYSDIIKGRFTISRDNAKNSLYLQMNSLKAEDTAVYYCARGFPLLRHGAMDYWGQGTLVTVSS

SEQ ID NO: 806 - protein, 5 aa, Artificial Sequence
  PM76B10-HCDR1
DYYMY

SEQ ID NO: 807 - protein, 17 aa, Artificial Sequence
  PM76B10-HCDR2
IISDGGYYTYYSDIIKG

SEQ ID NO: 808 - protein, 12 aa, Artificial Sequence
  PM76B10-HCDR3
GFPLLRHGAMDY

SEQ ID NO: 809 - DNA, 363 bp, Artificial Sequence
  PM76B10-H
caggtgcagctggtcgagtctggcggcggactggtgaagcctggcgagtccctgaggctgtcctgtgccgcctccggcttcaccttctccgactactacatgtactgggtccgccaggcccctgggaaggggctggaatgggtggccatcatctccgacggcggctactacacctactactccgacatcatcaagggccggttcaccatctcccgggacaacgccaagaacagcctgtacctgcagatgaactccctgaaggccgaggacaccgccgtgtactactgcgcccggggcttccctctgctgagacacggcgccatggattactggggccagggcaccctggtcaccgtctcctca

SEQ ID NO: 810 - protein, 107 aa, Artificial Sequence; identical to SEQ ID NO: 792
  PM76B10-L

SEQ ID NO: 811 - protein, 11 aa, Artificial Sequence
  PM76B10-LCDR1
KASQNVDTNVA

SEQ ID NO: 812 - protein, 7 aa, Artificial Sequence
  PM76B10-LCDR2
SASYRYS

SEQ ID NO: 813 - protein, 9 aa, Artificial Sequence
  PM76B10-LCDR3
QQYDSYPYT

SEQ ID NO: 814 - DNA, 321 bp, Artificial Sequence; identical to SEQ ID NO: 796
  PM76B10-L

SEQ ID NO: 815 - protein, 243 aa, Artificial Sequence
  PM76B10-HL
QVQLVESGGGLVKPGESLRLSCAASGFTFSDYYMYWVRQAPGKGLEWVAIISDGGYYTYYSDIIKGRFTISRDNAKNSLYLQMNSLKAEDTAVYYCARGFPLLRHGAMDYWGQGTLVTVSSGGGGSGGGGSGGGGSDIQMTQSPSSLSASVGDRVTITCKASQNVDTNVAWYQQKPGQAPKSLIYSASYRYSDVPSRFSGSASGTDFTLTISSVQSEDFATYYCQQYDSYPYTFGGGTKLEIK

SEQ ID NO: 816 - DNA, 729 bp, Artificial Sequence
  PM76B10-HL
caggtgcagctggtcgagtctggcggcggactggtgaagcctggcgagtccctgaggctgtcctgtgccgcctccggcttcaccttctccgactactacatgtactgggtccgccaggcccctgggaaggggctggaatgggtggccatcatctccgacggcggctactacacctactactccgacatcatcaagggccggttcaccatctcccgggacaacgccaagaacagcctgtacctgcagatgaactccctgaaggccgaggacaccgccgtgtactactgcgcccggggcttccctctgctgagacacggcgccatggattactggggccagggcaccctggtcaccgtctcctcaggtggtggtggttctggcggcggcggctccggtggtggtggttctgacatccagatgacccagtcccccagctccctgtccgcctccgtgggcgacagagtgaccatcacctgcaaggcctcccagaacgtggacaccaacgtggcctggtatcagcagaagcccggccaggcccctaagtccctgatctactccgcctcctaccggtactctgacgtgccttcccggttctccggctccgcgtccggcaccgacttcaccctgaccatctccagcgtgcagtctgaggacttcgccacgtactactgccagcagtacgactcctacccttacaccttcggcggagggaccaagctggaaatcaag

SEQ ID NO: 817 - protein, 498 aa, Artificial Sequence
  PM76B10 HL x I2C HL
QVQLVESGGGLVKPGESLRLSCAASGFTFSDYYMYWVRQAPGKGLEWVAIISDGGYYTYYSDIIKGRFTISRDNAKNSLYLQMNSLKAEDTAVYYCARGFPLLRHGAMDYWGQGTLVTVSSGGGGSGGGGSGGGGSDIQMTQSPSSLSASVGDRVTITCKASQNVDTNVAWYQQKPGQAPKSLIYSASYRYSDVPSRFSGSASGTDFTLTISSVQSEDFATYYCQQYDSYPYTFGGGTKLEIKSGGGGSEVQLVESGGGLVQPGGSLKLSCAASGFTFNKYAMNWVRQAPGKGLEWVARIRSKYNNYATYYADSVKDRFTISRDDSKNTAYLQMNNLKTEDTAVYYCVRHGNFGNSYISYWAYWGQGTLVTVSSGGGGSGGGGSGGGGSQTVVTQEPSLTVSPGGTVTLTCGSSTGAVTSGNYPNWVQQKPGQAPRGLIGGTKFLAPGTPARFSGSLLGGKAALTLSGVQPEDEAEYYCVLWYSNRWVFGGGTKLTVL

SEQ ID NO: 818 - DNA, 1494 bp, Artificial Sequence
  PM76B10 HL x I2C HL
caggtgcagctggtcgagtctggcggcggactggtgaagcctggcgagtccctgaggctgtcctgtgccgcctccggcttcaccttctccgactactacatgtactgggtccgccaggcccctgggaaggggctggaatgggtggccatcatctccgacggcggctactacacctactactccgacatcatcaagggccggttcaccatctcccgggacaacgccaagaacagcctgtacctgcagatgaactccctgaaggccgaggacaccgccgtgtactactgcgcccggggcttccctctgctgagacacggcgccatggattactggggccagggcaccctggtcaccgtctcctcaggtggtggtggttctggcggcggcggctccggtggtggtggttctgacatccagatgacccagtcccccagctccctgtccgcctccgtgggcgacagagtgaccatcacctgcaaggcctcccagaacgtggacaccaacgtggcctggtatcagcagaagcccggccaggcccctaagtccctgatctactccgcctcctaccggtactctgacgtgccttcccggttctccggctccgcgtccggcaccgacttcaccctgaccatctccagcgtgcagtctgaggacttcgccacgtactactgccagcagtacgactcctacccttacaccttcggcggagggaccaagctggaaatcaagtccggaggtggtggatccgaggtgcagctggtcgagtctggaggaggattggtgcagcctggagggtcattgaaactctcatgtgcagcctctggattcaccttcaataagtacgccatgaactgggtccgccaggctccaggaaagggtttggaatgggttgctcgcataagaagtaaatataataattatgcaacatattatgccgattcagtgaaagacaggttcaccatctccagagatgattcaaaaaacactgcctatctacaaatgaacaacttgaaaactgaggacactgccgtgtactactgtgtgagacatgggaacttcggtaatagctacatatcctactgggcttactggggccaagggactctggtcaccgtctcctcaggtggtggtggttctggcggcggcggctccggtggtggtggttctcagactgttgtgactcaggaaccttcactcaccgtatcacctggtggaacagtcacactcacttgtggctcctcgactggggctgttacatctggcaactacccaaactgggtccaacaaaaaccaggtcaggcaccccgtggtctaataggtgggactaagttcctcgcccccggtactcctgccagattctcaggctccctgcttggaggcaaggctgccctcaccctctcaggggtacagccagaggatgaggcagaatattactgtgttctatggtacagcaaccgctgggtgttcggtggaggaaccaaactgactgtccta

SEQ ID NO: 819 - DNA, 363 bp, Artificial Sequence
  PM76B10-Hcodon optimized
caggtgcagctggtcgagtctggcggcggactggtcaagcctggcgagtccctgagactgtcttgcgctgcctccggcttcaccttctccgactactacatgtactgggtccgccaggctcctggcaagggactggaatgggtggccatcatctccgacggcggctactacacctactactccgacatcatcaagggccggttcaccatctccagggacaacgccaagaactccctgtacctgcagatgaactccctgaaggccgaggacaccgccgtgtactactgcgccaggggcttcccactgctgagacacggcgccatggattactggggccagggcaccctggtcacagtgtcctct

SEQ ID NO: 820 - DNA, 321 bp, Artificial Sequence; identical to SEQ ID NO: 802
  PM76B10-Lcodon optimized

SEQ ID NO: 821 - DNA, 729 bp, Artificial Sequence
  PM76B10-HLcodon optimized
caggtgcagctggtcgagtctggcggcggactggtcaagcctggcgagtccctgagactgtcttgcgctgcctccggcttcaccttctccgactactacatgtactgggtccgccaggctcctggcaagggactggaatgggtggccatcatctccgacggcggctactacacctactactccgacatcatcaagggccggttcaccatctccagggacaacgccaagaactccctgtacctgcagatgaactccctgaaggccgaggacaccgccgtgtactactgcgccaggggcttcccactgctgagacacggcgccatggattactggggccagggcaccctggtcacagtgtcctctggcggaggcggaagtggaggcggaggaagcggaggcggcggatccgacatccagatgacccagtccccatcctccctgtctgcctccgtgggcgacagagtgaccatcacatgcaaggcctcccagaacgtggacaccaacgtggcatggtatcagcagaagccaggccaggcccctaagtccctgatctactctgcctcctaccggtactccgacgtgccctccaggttctctggctccgcctctggcaccgacttcaccctgaccatctcttccgtgcagtccgaggacttcgctacctactactgccagcagtacgactcctacccttacaccttcggcggaggcaccaagctggaaatcaag

SEQ ID NO: 822 - DNA, 1494 bp, Artificial Sequence
  PM76B10 HL x I2C HL codon optimized
caggtgcagctggtcgagtctggcggcggactggtcaagcctggcgagtccctgagactgtcttgcgctgcctccggcttcaccttctccgactactacatgtactgggtccgccaggctcctggcaagggactggaatgggtggccatcatctccgacggcggctactacacctactactccgacatcatcaagggccggttcaccatctccagggacaacgccaagaactccctgtacctgcagatgaactccctgaaggccgaggacaccgccgtgtactactgcgccaggggcttcccactgctgagacacggcgccatggattactggggccagggcaccctggtcacagtgtcctctggcggaggcggaagtggaggcggaggaagcggaggcggcggatccgacatccagatgacccagtccccatcctccctgtctgcctccgtgggcgacagagtgaccatcacatgcaaggcctcccagaacgtggacaccaacgtggcatggtatcagcagaagccaggccaggcccctaagtccctgatctactctgcctcctaccggtactccgacgtgccctccaggttctctggctccgcctctggcaccgacttcaccctgaccatctcttccgtgcagtccgaggacttcgctacctactactgccagcagtacgactcctacccttacaccttcggcggaggcaccaagctggaaatcaagtccggcggagggggctctgaagtgcagctggtggaaagcggagggggactggtgcagcccgggggaagtctgaagctgtcctgtgccgccagcggctttaccttcaacaagtacgccatgaattgggtccgacaggccccagggaaaggcctggaatgggtggcacggatccggtccaagtacaacaactacgccacctactacgctgactccgtgaaggacagattcaccatcagccgggacgactctaagaacaccgcctatctgcagatgaacaacctgaaaaccgaggatacagctgtgtactattgtgtgcggcacggcaacttcggcaactcctacatctcctactgggcctattggggacagggaacactggtcaccgtgtctagcggaggtggcggaagtgggggaggcggatctggcggtggcggatcccagaccgtggtcacccaggaaccttccctgaccgtctccccaggcggcaccgtgaccctgacctgtggctcctctaccggcgctgtgacctccggcaactaccctaactgggtgcagcagaaacccggacaggctcctagaggcctgatcggcggcaccaagtttctggcccctggcacccctgccagattctccggctccctgctgggaggcaaggccgctctgaccctgtctggcgtgcagcctgaggacgaggccgagtactactgtgtgctgtggtactccaacagatgggtgttcggaggcggcacaaagctgaccgtgctg

SEQ ID NO: 823 - protein, 119 aa, Artificial Sequence
  PM34C7-H
EVQLLEQSGAELVKPGASVKLSCTASGFNIKDTYMDWVKQRPEQGLEWIARIDPANGDSKYDPKFQGKATITADTSSNTAYLQLSSLTSEDTAVYYCARGGMIWYFDVWGQGTTVTVSS

SEQ ID NO: 824 - protein, 5 aa, Artificial Sequence
  PM34C7-HCDR1
DTYMD

SEQ ID NO: 825 - protein, 17 aa, Artificial Sequence
  PM34C7-HCDR2
RIDPANGDSKYDPKFQG

SEQ ID NO: 826 - protein, 9 aa, Artificial Sequence
  PM34C7-HCDR3
GGMIWYFDV

SEQ ID NO: 827 - DNA, 357 bp, Artificial Sequence
  PM34C7-H
gaggtgcagctgctcgagcagtctggggcagagcttgtgaagccaggggcctcagtcaagttgtcctgcacagcttctggcttcaacattaaagacacctatatggactgggtgaagcagaggcctgaacagggcctggaatggattgcaaggattgatcctgcgaatggtgatagtaaatatgacccgaaattccagggcaaggccactataacagcagacacatcctccaacacagcctacctgcagctcagcagcctgacatctgaggacactgccgtctattattgtgctagaggcgggatgatatggtacttcgatgtctggggccaagggaccacggtcaccgtctcctca

SEQ ID NO: 828 - protein, 108 aa, Artificial Sequence
  PM34C7-L
ELVLTQSPTTMAASPGEKITITCSASSSISSNYLHWYQQKPGFSPKLLIYRTSNLASGVPARFSGSGSGTSYSLTIGTMEAEDVATYYCQQGSSLPYTFGGGTKLEIK

SEQ ID NO: 829 - protein, 12 aa, Artificial Sequence
  PM34C7-LCDR1
SASSSISSNYLH

SEQ ID NO: 830 - protein, 7 aa, Artificial Sequence
  PM34C7-LCDR2
RTSNLAS

SEQ ID NO: 831 - protein, 9 aa, Artificial Sequence
  PM34C7-LCDR3
QQGSSLPYT

SEQ ID NO: 832 - DNA, 324 bp, Artificial Sequence
  PM34C7-L
gagctcgtgctcacccagtctccaaccaccatggctgcatctcccggggagaagatcactatcacctgcagtgccagctcaagtataagttccaattacttgcattggtatcagcagaagccaggattctcccctaaactcttgatttataggacatccaatctggcttctggagtcccagctcgcttcagtggcagtgggtctgggacctcttactctctcacaattggcaccatggaggctgaagatgttgccacttactactgccagcagggtagtagtttaccgtacacgttcggaggggggaccaagcttgagatcaaa

SEQ ID NO: 833 - protein, 242 aa, Artificial Sequence
  PM34C7-HL
EVQLLEQSGAELVKPGASVKLSCTASGFNIKDTYMDWVKQRPEQGLEWIARIDPANGDSKYDPKFQGKATITADTSSNTAYLQLSSLTSEDTAVYYCARGGMIWYFDVWGQGTTVTVSSGGGGSGGGGSGGGGSELVLTQSPTTMAASPGEKITITCSASSSISSNYLHWYQQKPGFSPKLLIYRTSNLASGVPARFSGSGSGTSYSLTIGTMEAEDVATYYCQQGSSLPYTFGGGTKLEIK

SEQ ID NO: 834 - DNA, 726 bp, Artificial Sequence
  PM34C7-HL
gaggtgcagctgctcgagcagtctggggcagagcttgtgaagccaggggcctcagtcaagttgtcctgcacagcttctggcttcaacattaaagacacctatatggactgggtgaagcagaggcctgaacagggcctggaatggattgcaaggattgatcctgcgaatggtgatagtaaatatgacccgaaattccagggcaaggccactataacagcagacacatcctccaacacagcctacctgcagctcagcagcctgacatctgaggacactgccgtctattattgtgctagaggcgggatgatatggtacttcgatgtctggggccaagggaccacggtcaccgtctcctcaggtggtggtggttctggcggcggcggctccggtggtggtggttctgagctcgtgctcacccagtctccaaccaccatggctgcatctcccggggagaagatcactatcacctgcagtgccagctcaagtataagttccaattacttgcattggtatcagcagaagccaggattctcccctaaactcttgatttataggacatccaatctggcttctggagtcccagctcgcttcagtggcagtgggtctgggacctcttactctctcacaattggcaccatggaggctgaagatgttgccacttactactgccagcagggtagtagtttaccgtacacgttcggaggggggaccaagcttgagatcaaa

SEQ ID NO: 835 - protein, 497 aa, Artificial Sequence
  PM34C7 HL x I2C HL
EVQLLEQSGAELVKPGASVKLSCTASGFNIKDTYMDWVKQRPEQGLEWIARIDPANGDSKYDPKFQGKATITADTSSNTAYLQLSSLTSEDTAVYYCARGGMIWYFDVWGQGTTVTVSSGGGGSGGGGSGGGGSELVLTQSPTTMAASPGEKITITCSASSSISSNYLHWYQQKPGFSPKLLIYRTSNLASGVPARFSGSGSGTSYSLTIGTMEAEDVATYYCQQGSSLPYTFGGGTKLEIKSGGGGSEVQLVESGGGLVQPGGSLKLSCAASGFTFNKYAMNWVRQAPGKGLEWVARIRSKYNNYATYYADSVKDRFTISRDDSKNTAYLQMNNLKTEDTAVYYCVRHGNFGNSYISYWAYWGQGTLVTVSSGGGGSGGGGSGGGGSQTVVTQEPSLTVSPGGTVTLTCGSSTGAVTSGNYPNWVQQKPGQAPRGLIGGTKFLAPGTPARFSGSLLGGKAALTLSGVQPEDEAEYYCVLWYSNRWVFGGGTKLTVL

SEQ ID NO: 836 - DNA, 1491 bp, Artificial Sequence
  PM34C7 HL x I2C HL
gaggtgcagctgctcgagcagtctggggcagagcttgtgaagccaggggcctcagtcaagttgtcctgcacagcttctggcttcaacattaaagacacctatatggactgggtgaagcagaggcctgaacagggcctggaatggattgcaaggattgatcctgcgaatggtgatagtaaatatgacccgaaattccagggcaaggccactataacagcagacacatcctccaacacagcctacctgcagctcagcagcctgacatctgaggacactgccgtctattattgtgctagaggcgggatgatatggtacttcgatgtctggggccaagggaccacggtcaccgtctcctcaggtggtggtggttctggcggcggcggctccggtggtggtggttctgagctcgtgctcacccagtctccaaccaccatggctgcatctcccggggagaagatcactatcacctgcagtgccagctcaagtataagttccaattacttgcattggtatcagcagaagccaggattctcccctaaactcttgatttataggacatccaatctggcttctggagtcccagctcgcttcagtggcagtgggtctgggacctcttactctctcacaattggcaccatggaggctgaagatgttgccacttactactgccagcagggtagtagtttaccgtacacgttcggaggggggaccaagcttgagatcaaatccggaggtggtggatccgaggtgcagctggtcgagtctggaggaggattggtgcagcctggagggtcattgaaactctcatgtgcagcctctggattcaccttcaataagtacgccatgaactgggtccgccaggctccaggaaagggtttggaatgggttgctcgcataagaagtaaatataataattatgcaacatattatgccgattcagtgaaagacaggttcaccatctccagagatgattcaaaaaacactgcctatctacaaatgaacaacttgaaaactgaggacactgccgtgtactactgtgtgagacatgggaacttcggtaatagctacatatcctactgggcttactggggccaagggactctggtcaccgtctcctcaggtggtggtggttctggcggcggcggctccggtggtggtggttctcagactgttgtgactcaggaaccttcactcaccgtatcacctggtggaacagtcacactcacttgtggctcctcgactggggctgttacatctggcaactacccaaactgggtccaacaaaaaccaggtcaggcaccccgtggtctaataggtgggactaagttcctcgcccccggtactcctgccagattctcaggctccctgcttggaggcaaggctgccctcaccctctcaggggtacagccagaggatgaggcagaatattactgtgttctatggtacagcaaccgctgggtgttcggtggaggaaccaaactgactgtccta

SEQ ID NO: 837 - protein, 120 aa, Artificial Sequence
  PM49B9-H
QVQLVQSGAEVKKPGASVKLSCKASGYTFTYFDINWVRQTPEQGLEWMGGISPGDGNTNYNENFKGRVTMTRDTSNSTAYMELSRLRSDDTAVYYCARDGNFPYYAMDSWGQGTTVTVSS

SEQ ID NO: 838 - protein, 5 aa, Artificial Sequence
  PM49B9-HCDR1
YFDIN

SEQ ID NO: 839 - protein, 17 aa, Artificial Sequence
  PM49B9-HCDR2
GISPGDGNTNYNENFKG

SEQ ID NO: 840 - protein, 11 aa, Artificial Sequence
  PM49B9-HCDR3
DGNFPYYAMDS

SEQ ID NO: 841 - DNA, 360 bp, Artificial Sequence
  PM49B9-H
caggtgcagctggtccagtctggcgccgaagtgaagaagcctggcgcctccgtgaagctgtcctgcaaggcctccggctacaccttcacctacttcgacatcaactgggtgcggcagacgcctgagcagggcctggaatggatgggcggcatctcccctggcgacggcaacaccaactacaacgagaacttcaagggcagggtcacaatgaccagagacacgtccaactccaccgcctacatggagctgtcccggctgagatctgacgacaccgccgtgtactactgcgccagggacggcaacttcccttactacgccatggactcttggggccagggcaccacggtcaccgtctcctca

SEQ ID NO: 842 - protein, 112 aa, Artificial Sequence
  PM49B9-L
DIVMTQTPLSLPVTLGDPASISCRSSQSLVYSNGNTYLNWYQQRPGQSPRLLIYKVSNRFSGVPDRFSGSGSGTDFTLKISRVEAEDVGVYYCSQSTHVPYTFGQGTKLEIK

SEQ ID NO: 843 - protein, 16 aa, Artificial Sequence
  PM49B9-LCDR1
RSSQSLVYSNGNTYLN

SEQ ID NO: 844 - protein, 7 aa, Artificial Sequence
  PM49B9-LCDR2
KVSNRFS

SEQ ID NO: 845 - protein, 9 aa, Artificial Sequence
  PM49B9-LCDR3
SQSTHVPYT

SEQ ID NO: 846 - DNA, 336 bp, Artificial Sequence
  PM49B9-L
gacgtcgtgatgactcagactccactctccctgcccgtcacccttggagacccggcctccatctcctgcaggtctagtcaaagcctcgtatacagtaacggaaacacctacttgaattggtatcaacagaggccaggccaatctccaagactcctaatttataaggtttctaaccggttctctggggtcccagacagattcagcggcagtgggtcaggcactgatttcacactgaaaatcagcagggtggaggctgaggatgttggggtttactactgctctcaaagtacacatgttccgtacacgtttggccaggggaccaagctggagatcaaa

SEQ ID NO: 847 - protein, 247 aa, Artificial Sequence
  PM49B9-HL
QVQLVQSGAEVKKPGASVKLSCKASGYTFTYFDINWVRQTPEQGLEWMGGISPGDGNTNYNENFKGRVTMTRDTSNSTAYMELSRLRSDDTAVYYCARDGNFPYYAMDSWGQGTTVTVSSGGGGSGGGGSGGGGSDIVMTQTPLSLPVTLGDPASISCRSSQSLVYSNGNTYLNWYQQRPGQSPRLLIYKVSNRFSGVPDRFSGSGSGTDFTLKISRVEAEDVGVYYCSQSTHVPYTFGQGTKLEIK

SEQ ID NO: 848 - DNA, 741 bp, Artificial Sequence
  PM49B9-HL
caggtgcagctggtccagtctggcgccgaagtgaagaagcctggcgcctccgtgaagctgtcctgcaaggcctccggctacaccttcacctacttcgacatcaactgggtgcggcagacgcctgagcagggcctggaatggatgggcggcatctcccctggcgacggcaacaccaactacaacgagaacttcaagggcagggtcacaatgaccagagacacgtccaactccaccgcctacatggagctgtcccggctgagatctgacgacaccgccgtgtactactgcgccagggacggcaacttcccttactacgccatggactcttggggccagggcaccacggtcaccgtctcctcaggtggtggtggttctggcggcggcggctccggtggtggtggttctgacgtcgtgatgactcagactccactctccctgcccgtcacccttggagacccggcctccatctcctgcaggtctagtcaaagcctcgtatacagtaacggaaacacctacttgaattggtatcaacagaggccaggccaatctccaagactcctaatttataaggtttctaaccggttctctggggtcccagacagattcagcggcagtgggtcaggcactgatttcacactgaaaatcagcagggtggaggctgaggatgttggggtttactactgctctcaaagtacacatgttccgtacacgtttggccaggggaccaagctggagatcaaa

SEQ ID NO: 849 - protein, 502 aa, Artificial Sequence
  PM49B9 HL x I2C HL
QVQLVQSGAEVKKPGASVKLSCKASGYTFTYFDINWVRQTPEQGLEWMGGISPGDGNTNYNENFKGRVTMTRDTSNSTAYMELSRLRSDDTAVYYCARDGNFPYYAMDSWGQGTTVTVSSGGGGSGGGGSGGGGSDIVMTQTPLSLPVTLGDPASISCRSSQSLVYSNGNTYLNWYQQRPGQSPRLLIYKVSNRFSGVPDRFSGSGSGTDFTLKISRVEAEDVGVYYCSQSTHVPYTFGQGTKLEIKSGGGGSEVQLVESGGGLVQPGGSLKLSCAASGFTFNKYAMNWVRQAPGKGLEWVARIRSKYNNYATYYADSVKDRFTISRDDSKNTAYLQMNNLKTEDTAVYYCVRHGNFGNSYISYWAYWGQGTLVTVSSGGGGSGGGGSGGGGSQTVVTQEPSLTVSPGGTVTLTCGSSTGAVTSGNYPNWVQQKPGQAPRGLIGGTKFLAPGTPARFSGSLLGGKAALTLSGVQPEDEAEYYCVLWYSNRWVFGGGTKLTVL

SEQ ID NO: 850 - DNA, 1506 bp, Artificial Sequence
  PM49B9 HL x I2C HL
caggtgcagctggtccagtctggcgccgaagtgaagaagcctggcgcctccgtgaagctgtcctgcaaggcctccggctacaccttcacctacttcgacatcaactgggtgcggcagacgcctgagcagggcctggaatggatgggcggcatctcccctggcgacggcaacaccaactacaacgagaacttcaagggcagggtcacaatgaccagagacacgtccaactccaccgcctacatggagctgtcccggctgagatctgacgacaccgccgtgtactactgcgccagggacggcaacttcccttactacgccatggactcttggggccagggcaccacggtcaccgtctcctcaggtggtggtggttctggcggcggcggctccggtggtggtggttctgacgtcgtgatgactcagactccactctccctgcccgtcacccttggagacccggcctccatctcctgcaggtctagtcaaagcctcgtatacagtaacggaaacacctacttgaattggtatcaacagaggccaggccaatctccaagactcctaatttataaggtttctaaccggttctctggggtcccagacagattcagcggcagtgggtcaggcactgatttcacactgaaaatcagcagggtggaggctgaggatgttggggtttactactgctctcaaagtacacatgttccgtacacgtttggccaggggaccaagctggagatcaaatccggaggtggtggatccgaggtgcagctggtcgagtctggaggaggattggtgcagcctggagggtcattgaaactctcatgtgcagcctctggattcaccttcaataagtacgccatgaactgggtccgccaggctccaggaaagggtttggaatgggttgctcgcataagaagtaaatataataattatgcaacatattatgccgattcagtgaaagacaggttcaccatctccagagatgattcaaaaaacactgcctatctacaaatgaacaacttgaaaactgaggacactgccgtgtactactgtgtgagacatgggaacttcggtaatagctacatatcctactgggcttactggggccaagggactctggtcaccgtctcctcaggtggtggtggttctggcggcggcggctccggtggtggtggttctcagactgttgtgactcaggaaccttcactcaccgtatcacctggtggaacagtcacactcacttgtggctcctcgactggggctgttacatctggcaactacccaaactgggtccaacaaaaaccaggtcaggcaccccgtggtctaataggtgggactaagttcctcgcccccggtactcctgccagattctcaggctccctgcttggaggcaaggctgccctcaccctctcaggggtacagccagaggatgaggcagaatattactgtgttctatggtacagcaaccgctgggtgttcggtggaggaaccaaactgactgtccta

SEQ ID NO: 851 - protein, 120 aa, Artificial Sequence; identical to SEQ ID NO: 837
  PM29G1-H

SEQ ID NO: 852 - protein, 5 aa, Artificial Sequence
  PM29G1-HCDR1
YFDIN

SEQ ID NO: 853 - protein, 17 aa, Artificial Sequence
  PM29G1-HCDR2
GISPGDGNTNYNENFKG

SEQ ID NO: 854 - protein, 11 aa, Artificial Sequence
  PM29G1-HCDR3
DGNFPYYAMDS

SEQ ID NO: 855 - DNA, 360 bp, Artificial Sequence; identical to SEQ ID NO: 841
  PM29G1-H

SEQ ID NO: 856 - protein, 112 aa, Artificial Sequence
  PM29G1-L
DVVMTQSPLSLPVTLGEPASISCRSSQSLVYSNGNTYLHWYQQKPGQSPRLLIYKVSNRFSGVPDRFSGSGSGTDFTLKISRVEAEDVGVYFCSQSTHVPYTFGQGTKLEIK

SEQ ID NO: 857 - protein, 16 aa, Artificial Sequence
  PM29G1-LCDR1
RSSQSLVYSNGNTYLH

SEQ ID NO: 858 - protein, 7 aa, Artificial Sequence
  PM29G1-LCDR2
KVSNRFS

SEQ ID NO: 859 - protein, 9 aa, Artificial Sequence
  PM29G1-LCDR3
SQSTHVPYT

SEQ ID NO: 860 - DNA, 336 bp, Artificial Sequence
  PM29G1-L
gacgtcgtgatgactcagtctccactctccctgcccgtcacccttggagagccggcctccatctcctgcaggtctagtcaaagcctcgtatacagtaacggaaacacctacttgcattggtatcaacagaagccaggccaatctccaagactcctaatttataaggtttctaaccggttctctggggtcccagacagattcagcggcagtgggtcaggcactgatttcacactgaaaatcagcagggtggaggctgaggatgttggggtttatttctgctctcaaagtacacatgttccgtacacgtttggccaggggaccaagctggagatcaaa

SEQ ID NO: 861 - protein, 247 aa, Artificial Sequence
  PM29G1-HL
QVQLVQSGAEVKKPGASVKLSCKASGYTFTYFDINWVRQTPEQGLEWMGGISPGDGNTNYNENFKGRVTMTRDTSNSTAYMELSRLRSDDTAVYYCARDGNFPYYAMDSWGQGTTVTVSSGGGGSGGGGSGGGGSDVVMTQSPLSLPVTLGEPASISCRSSQSLVYSNGNTYLHWYQQKPGQSPRLLIYKVSNRFSGVPDRFSGSGSGTDFTLKISRVEAEDVGVYFCSQSTHVPYTFGQGTKLEIK

SEQ ID NO: 862 - DNA, 741 bp, Artificial Sequence
  PM29G1-HL
caggtgcagctggtccagtctggcgccgaagtgaagaagcctggcgcctccgtgaagctgtcctgcaaggcctccggctacaccttcacctacttcgacatcaactgggtgcggcagacgcctgagcagggcctggaatggatgggcggcatctcccctggcgacggcaacaccaactacaacgagaacttcaagggcagggtcacaatgaccagagacacgtccaactccaccgcctacatggagctgtcccggctgagatctgacgacaccgccgtgtactactgcgccagggacggcaacttcccttactacgccatggactcttggggccagggcaccacggtcaccgtctcctcaggtggtggtggttctggcggcggcggctccggtggtggtggttctgacgtcgtgatgactcagtctccactctccctgcccgtcacccttggagagccggcctccatctcctgcaggtctagtcaaagcctcgtatacagtaacggaaacacctacttgcattggtatcaacagaagccaggccaatctccaagactcctaatttataaggtttctaaccggttctctggggtcccagacagattcagcggcagtgggtcaggcactgatttcacactgaaaatcagcagggtggaggctgaggatgttggggtttatttctgctctcaaagtacacatgttccgtacacgtttggccaggggaccaagctggagatcaaa

SEQ ID NO: 863 - protein, 502 aa, Artificial Sequence
  PM29G1 HL x I2C HL
QVQLVQSGAEVKKPGASVKLSCKASGYTFTYFDINWVRQTPEQGLEWMGGISPGDGNTNYNENFKGRVTMTRDTSNSTAYMELSRLRSDDTAVYYCARDGNFPYYAMDSWGQGTTVTVSSGGGGSGGGGSGGGGSDVVMTQSPLSLPVTLGEPASISCRSSQSLVYSNGNTYLHWYQQKPGQSPRLLIYKVSNRFSGVPDRFSGSGSGTDFTLKISRVEAEDVGVYFCSQSTHVPYTFGQGTKLEIKSGGGGSEVQLVESGGGLVQPGGSLKLSCAASGFTFNKYAMNWVRQAPGKGLEWVARIRSKYNNYATYYADSVKDRFTISRDDSKNTAYLQMNNLKTEDTAVYYCVRHGNFGNSYISYWAYWGQGTLVTVSSGGGGSGGGGSGGGGSQTVVTQEPSLTVSPGGTVTLTCGSSTGAVTSGNYPNWVQQKPGQAPRGLIGGTKFLAPGTPARFSGSLLGGKAALTLSGVQPEDEAEYYCVLWYSNRWVFGGGTKLTVL

SEQ ID NO: 864 - DNA, 1506 bp, Artificial Sequence
  PM29G1 HL x I2C HL
caggtgcagctggtccagtctggcgccgaagtgaagaagcctggcgcctccgtgaagctgtcctgcaaggcctccggctacaccttcacctacttcgacatcaactgggtgcggcagacgcctgagcagggcctggaatggatgggcggcatctcccctggcgacggcaacaccaactacaacgagaacttcaagggcagggtcacaatgaccagagacacgtccaactccaccgcctacatggagctgtcccggctgagatctgacgacaccgccgtgtactactgcgccagggacggcaacttcccttactacgccatggactcttggggccagggcaccacggtcaccgtctcctcaggtggtggtggttctggcggcggcggctccggtggtggtggttctgacgtcgtgatgactcagtctccactctccctgcccgtcacccttggagagccggcctccatctcctgcaggtctagtcaaagcctcgtatacagtaacggaaacacctacttgcattggtatcaacagaagccaggccaatctccaagactcctaatttataaggtttctaaccggttctctggggtcccagacagattcagcggcagtgggtcaggcactgatttcacactgaaaatcagcagggtggaggctgaggatgttggggtttatttctgctctcaaagtacacatgttccgtacacgtttggccaggggaccaagctggagatcaaatccggaggtggtggatccgaggtgcagctggtcgagtctggaggaggattggtgcagcctggagggtcattgaaactctcatgtgcagcctctggattcaccttcaataagtacgccatgaactgggtccgccaggctccaggaaagggtttggaatgggttgctcgcataagaagtaaatataataattatgcaacatattatgccgattcagtgaaagacaggttcaccatctccagagatgattcaaaaaacactgcctatctacaaatgaacaacttgaaaactgaggacactgccgtgtactactgtgtgagacatgggaacttcggtaatagctacatatcctactgggcttactggggccaagggactctggtcaccgtctcctcaggtggtggtggttctggcggcggcggctccggtggtggtggttctcagactgttgtgactcaggaaccttcactcaccgtatcacctggtggaacagtcacactcacttgtggctcctcgactggggctgttacatctggcaactacccaaactgggtccaacaaaaaccaggtcaggcaccccgtggtctaataggtgggactaagttcctcgcccccggtactcctgccagattctcaggctccctgcttggaggcaaggctgccctcaccctctcaggggtacagccagaggatgaggcagaatattactgtgttctatggtacagcaaccgctgggtgttcggtggaggaaccaaactgactgtccta

SEQ ID NO: 865 - DNA, 360 bp, Artificial Sequence
  PM29G1-Hcodon optimized
caggtgcagctggtccagtcaggcgccgaagtgaagaaacctggcgcctctgtgaagctgtcctgcaaggcctccggctacaccttcacctacttcgacatcaactgggtccgccagacccctgagcagggcctggaatggatgggcggcatctcccctggcgacggcaacaccaactacaacgagaacttcaagggcagagtgaccatgaccagggacacctctaactccaccgcctacatggaactgtcccggctgagatccgacgacaccgccgtgtactactgcgccagggacggcaacttcccttactacgccatggactcttggggccagggcaccaccgtgacagtgtcctct

SEQ ID NO: 866 - DNA, 336 bp, Artificial Sequence
  PM29G1-Lcodon optimized
gatgtggtcatgacccagtccccactgtccctgcctgtgaccctgggcgagcctgcctccatctcctgccggtcctcccagtccctggtgtactccaacggcaatacctacctgcactggtatcagcagaagcctggccagtcccctaggctgctgatctacaaggtgtccaaccggttctccggcgtgcccgacagattctccggctccggctctggcaccgacttcacactgaagatctccagggtggaggctgaggacgtgggcgtgtacttctgctcccagtccacccacgtgccctacaccttcggacagggcaccaagctggaaatcaag

SEQ ID NO: 867 - DNA, 741 bp, Artificial Sequence
  PM29G1-Hcodon optimized
caggtgcagctggtccagtcaggcgccgaagtgaagaaacctggcgcctctgtgaagctgtcctgcaaggcctccggctacaccttcacctacttcgacatcaactgggtccgccagacccctgagcagggcctggaatggatgggcggcatctcccctggcgacggcaacaccaactacaacgagaacttcaagggcagagtgaccatgaccagggacacctctaactccaccgcctacatggaactgtcccggctgagatccgacgacaccgccgtgtactactgcgccagggacggcaacttcccttactacgccatggactcttggggccagggcaccaccgtgacagtgtcctctggcggcggaggaagtggaggtggaggatctggcggaggcggctccgatgtggtcatgacccagtccccactgtccctgcctgtgaccctgggcgagcctgcctccatctcctgccggtcctcccagtccctggtgtactccaacggcaatacctacctgcactggtatcagcagaagcctggccagtcccctaggctgctgatctacaaggtgtccaaccggttctccggcgtgcccgacagattctccggctccggctctggcaccgacttcacactgaagatctccagggtggaggctgaggacgtgggcgtgtacttctgctcccagtccacccacgtgccctacaccttcggacagggcaccaagctggaaatcaag

SEQ ID NO: 868 - DNA, 1506 bp, Artificial Sequence
  PM29G1 HL x I2C HL codon optimized
caggtgcagctggtccagtcaggcgccgaagtgaagaaacctggcgcctctgtgaagctgtcctgcaaggcctccggctacaccttcacctacttcgacatcaactgggtccgccagacccctgagcagggcctggaatggatgggcggcatctcccctggcgacggcaacaccaactacaacgagaacttcaagggcagagtgaccatgaccagggacacctctaactccaccgcctacatggaactgtcccggctgagatccgacgacaccgccgtgtactactgcgccagggacggcaacttcccttactacgccatggactcttggggccagggcaccaccgtgacagtgtcctctggcggcggaggaagtggaggtggaggatctggcggaggcggctccgatgtggtcatgacccagtccccactgtccctgcctgtgaccctgggcgagcctgcctccatctcctgccggtcctcccagtccctggtgtactccaacggcaatacctacctgcactggtatcagcagaagcctggccagtcccctaggctgctgatctacaaggtgtccaaccggttctccggcgtgcccgacagattctccggctccggctctggcaccgacttcacactgaagatctccagggtggaggctgaggacgtgggcgtgtacttctgctcccagtccacccacgtgccctacaccttcggacagggcaccaagctggaaatcaagtctggcggagggggctctgaagtgcagctggtggaaagcggagggggactggtgcagcccgggggaagtctgaagctgtcctgtgccgccagcggctttaccttcaacaagtacgccatgaattgggtccgacaggccccagggaaaggcctggaatgggtggcacggatccggtccaagtacaacaactacgccacctactacgctgactccgtgaaggacagattcaccatcagccgggacgactctaagaacaccgcctatctgcagatgaacaacctgaaaaccgaggatacagctgtgtactattgtgtgcggcacggcaacttcggcaactcctacatctcctactgggcctattggggacagggaacactggtcaccgtgtctagcggaggtggcggaagtgggggaggcggatctggcggtggcggatcccagaccgtggtcacccaggaaccttccctgaccgtctccccaggcggcaccgtgaccctgacctgtggctcctctaccggcgctgtgacctccggcaactaccctaactgggtgcagcagaaacccggacaggctcctagaggcctgatcggcggcaccaagtttctggcccctggcacccctgccagattctccggctccctgctgggaggcaaggccgctctgaccctgtctggcgtgcagcctgaggacgaggccgagtactactgtgtgctgtggtactccaacagatgggtgttcggaggcggcacaaagctgaccgtgctg

SEQ ID NO: 869 - protein, 118 aa, Artificial Sequence
  PM08B6-H
QVQLVQSGAEVMKPGASVKVSCKASGYTITDTYMDWVRQAPGQGLEWIARIDPANGDSKYDPKFQGRVTMTADTSTNTVYMELSSLRSEDTAVYYCARGGMIWYFDVWGQGTTVTVSS

SEQ ID NO: 870 - protein, 5 aa, Artificial Sequence
  PM08B6-HCDR1
DTYMD

SEQ ID NO: 871 - protein, 17 aa, Artificial Sequence
  PM08B6-HCDR2
RIDPANGDSKYDPKFQG

SEQ ID NO: 872 - protein, 9 aa, Artificial Sequence
  PM08B6-HCDR3
GGMIWYFDV

SEQ ID NO: 873 - DNA, 354 bp, Artificial Sequence
  PM08B6-H
caggtgcagctggtccagtctggggcagaggttatgaaaccaggggcctcagtcaaggtgtcctgcaaagcttctggctacaccattacagacacctatatggactgggtgaggcaggcgcctggacagggcctggaatggattgcaaggattgatcctgcgaatggtgatagtaaatatgacccgaaattccagggcagggtcactatgacagcagacacatccaccaacacagtctacatggagctcagcagcctgagatctgaggacactgccgtctattattgtgctagaggcgggatgatatggtacttcgatgtctggggccaagggaccacggtcaccgtctcctca

SEQ ID NO: 874 - protein, 108 aa, Artificial Sequence
  PM08B6-L
EIVLTQSPATLAVSPGEKVTLSCSASSSISSNYLHWYQQKPGLPPRLLIYRTSNLASGVPDRFSGSGSGTDFTLTISRLEPEDFATYYCQQGSSLPYTFGQGTKLEIK

SEQ ID NO: 875 - protein, 12 aa, Artificial Sequence
  PM08B6-LCDR1
SASSSISSNYLH

SEQ ID NO: 876 - protein, 7 aa, Artificial Sequence
  PM08B6-LCDR2
RTSNLAS

SEQ ID NO: 877 - protein, 9 aa, Artificial Sequence
  PM08B6-LCDR3
QQGSSLPYT

SEQ ID NO: 878 - DNA, 324 bp, Artificial Sequence
  PM08B6-L
gagatcgtgctcacccagtctccagccaccctggctgtatctcccggggagaaggtcactctctcctgcagtgccagctcaagtataagttccaattacttgcattggtatcagcagaagccaggattgccccctagactcttgatttataggacatccaatctggcttctggagtcccagatcgcttcagtggcagtgggtctgggaccgatttcactctcacaattagcaggctggagcctgaagattttgccacttactactgccagcagggtagtagtttaccgtacacgttcggacaagggaccaagcttgagatcaaa

SEQ ID NO: 879 - protein, 241 aa, Artificial Sequence
  PM08B6-HL
QVQLVQSGAEVMKPGASVKVSCKASGYTITDTYMDWVRQAPGQGLEWIARIDPANGDSKYDPKFQGRVTMTADTSTNTVYMELSSLRSEDTAVYYCARGGMIWYFDVWGQGTTVTVSSGGGGSGGGGSGGGGSEIVLTQSPATLAVSPGEKVTLSCSASSSISSNYLHWYQQKPGLPPRLLIYRTSNLASGVPDRFSGSGSGTDFTLTISRLEPEDFATYYCQQGSSLPYTFGQGTKLEIK

SEQ ID NO: 880 - DNA, 723 bp, Artificial Sequence
  PM08B6-HL
caggtgcagctggtccagtctggggcagaggttatgaaaccaggggcctcagtcaaggtgtcctgcaaagcttctggctacaccattacagacacctatatggactgggtgaggcaggcgcctggacagggcctggaatggattgcaaggattgatcctgcgaatggtgatagtaaatatgacccgaaattccagggcagggtcactatgacagcagacacatccaccaacacagtctacatggagctcagcagcctgagatctgaggacactgccgtctattattgtgctagaggcgggatgatatggtacttcgatgtctggggccaagggaccacggtcaccgtctcctcaggtggtggtggttctggcggcggcggctccggtggtggtggttctgagatcgtgctcacccagtctccagccaccctggctgtatctcccggggagaaggtcactctctcctgcagtgccagctcaagtataagttccaattacttgcattggtatcagcagaagccaggattgccccctagactcttgatttataggacatccaatctggcttctggagtcccagatcgcttcagtggcagtgggtctgggaccgatttcactctcacaattagcaggctggagcctgaagattttgccacttactactgccagcagggtagtagtttaccgtacacgttcggacaagggaccaagcttgagatcaaa

SEQ ID NO: 881 - protein, 496 aa, Artificial Sequence
  PM08B6 HL X I2C HL
QVQLVQSGAEVMKPGASVKVSCKASGYTITDTYMDWVRQAPGQGLEWIARIDPANGDSKYDPKFQGRVTMTADTSTNTVYMELSSLRSEDTAVYYCARGGMIWYFDVWGQGTTVTVSSGGGGSGGGGSGGGGSEIVLTQSPATLAVSPGEKVTLSCSASSSISSNYLHWYQQKPGLPPRLLIYRTSNLASGVPDRFSGSGSGTDFTLTISRLEPEDFATYYCQQGSSLPYTFGQGTKLEIKSGGGGSEVQLVESGGGLVQPGGSLKLSCAASGFTFNKYAMNWVRQAPGKGLEWVARIRSKYNNYATYYADSVKDRFTISRDDSKNTAYLQMNNLKTEDTAVYYCVRHGNFGNSYISYWAYWGQGTLVTVSSGGGGSGGGGSGGGGSQTVVTQEPSLTVSPGGTVTLTCGSSTGAVTSGNYPNWVQQKPGQAPRGLIGGTKFLAPGTPARFSGSLLGGKAALTLSGVQPEDEAEYYCVLWYSNRWVFGGGTKLTVL

SEQ ID NO: 882 - DNA, 1488 bp, Artificial Sequence
  PM08B6 HL X I2C HL
caggtgcagctggtccagtctggggcagaggttatgaaaccaggggcctcagtcaaggtgtcctgcaaagcttctggctacaccattacagacacctatatggactgggtgaggcaggcgcctggacagggcctggaatggattgcaaggattgatcctgcgaatggtgatagtaaatatgacccgaaattccagggcagggtcactatgacagcagacacatccaccaacacagtctacatggagctcagcagcctgagatctgaggacactgccgtctattattgtgctagaggcgggatgatatggtacttcgatgtctggggccaagggaccacggtcaccgtctcctcaggtggtggtggttctggcggcggcggctccggtggtggtggttctgagatcgtgctcacccagtctccagccaccctggctgtatctcccggggagaaggtcactctctcctgcagtgccagctcaagtataagttccaattacttgcattggtatcagcagaagccaggattgccccctagactcttgatttataggacatccaatctggcttctggagtcccagatcgcttcagtggcagtgggtctgggaccgatttcactctcacaattagcaggctggagcctgaagattttgccacttactactgccagcagggtagtagtttaccgtacacgttcggacaagggaccaagcttgagatcaaatccggaggtggtggatccgaggtgcagctggtcgagtctggaggaggattggtgcagcctggagggtcattgaaactctcatgtgcagcctctggattcaccttcaataagtacgccatgaactgggtccgccaggctccaggaaagggtttggaatgggttgctcgcataagaagtaaatataataattatgcaacatattatgccgattcagtgaaagacaggttcaccatctccagagatgattcaaaaaacactgcctatctacaaatgaacaacttgaaaactgaggacactgccgtgtactactgtgtgagacatgggaacttcggtaatagctacatatcctactgggcttactggggccaagggactctggtcaccgtctcctcaggtggtggtggttctggcggcggcggctccggtggtggtggttctcagactgttgtgactcaggaaccttcactcaccgtatcacctggtggaacagtcacactcacttgtggctcctcgactggggctgttacatctggcaactacccaaactgggtccaacaaaaaccaggtcaggcaccccgtggtctaataggtgggactaagttcctcgcccccggtactcctgccagattctcaggctccctgcttggaggcaaggctgccctcaccctctcaggggtacagccagaggatgaggcagaatattactgtgttctatggtacagcaaccgctgggtgttcggtggaggaaccaaactgactgtccta

SEQ ID NO: 883 - DNA, 354 bp, Artificial Sequence
  PM08B6-Hcodon optimized
caggtgcagctggtccagtctggcgccgaagtgatgaagcctggcgcctccgtgaaggtgtcctgcaaggcctccggctacaccatcaccgacacctacatggactgggtgcggcaggctcctggacagggcctggaatggatcgcccggatcgaccctgccaacggcgactccaagtacgaccctaagttccagggcagagtgaccatgaccgccgacacctccaccaacaccgtgtacatggaactgtcctccctgcggtctgaggacaccgccgtgtactactgcgccaggggcggcatgatctggtacttcgacgtgtggggccagggcaccaccgtgacagtgtcctct

SEQ ID NO: 884 - DNA, 324 bp, Artificial Sequence
  PM08B6-Lcodon optimized
gagatcgtgctgacccagtctcctgccaccctggctgtgtctcccggcgagaaagtgaccctgtcctgctccgcctcctcctccatctcctccaactacctgcactggtatcagcagaagcctggcctgcctcctcggctgctgatctaccggacctccaacctggcctctggcgtgcccgacaggttctccggctctggctccggcaccgacttcaccctgaccatctcccggctggaacctgaggacttcgccacctactactgccagcagggctcctccctgccttacaccttcggacagggcaccaagctggaaatcaag

SEQ ID NO: 885 - DNA, 723 bp, Artificial Sequence
  PM08B6-HLcodon optimized
caggtgcagctggtccagtctggcgccgaagtgatgaagcctggcgcctccgtgaaggtgtcctgcaaggcctccggctacaccatcaccgacacctacatggactgggtgcggcaggctcctggacagggcctggaatggatcgcccggatcgaccctgccaacggcgactccaagtacgaccctaagttccagggcagagtgaccatgaccgccgacacctccaccaacaccgtgtacatggaactgtcctccctgcggtctgaggacaccgccgtgtactactgcgccaggggcggcatgatctggtacttcgacgtgtggggccagggcaccaccgtgacagtgtcctctggcggcggaggaagtggaggtggaggatctggtggaggcggctccgagatcgtgctgacccagtctcctgccaccctggctgtgtctcccggcgagaaagtgaccctgtcctgctccgcctcctcctccatctcctccaactacctgcactggtatcagcagaagcctggcctgcctcctcggctgctgatctaccggacctccaacctggcctctggcgtgcccgacaggttctccggctctggctccggcaccgacttcaccctgaccatctcccggctggaacctgaggacttcgccacctactactgccagcagggctcctccctgccttacaccttcggacagggcaccaagctggaaatcaag

SEQ ID NO: 886 - DNA, 1488 bp, Artificial Sequence
  PM08B6 HL x I2C HL codon optimized
caggtgcagctggtccagtctggcgccgaagtgatgaagcctggcgcctccgtgaaggtgtcctgcaaggcctccggctacaccatcaccgacacctacatggactgggtgcggcaggctcctggacagggcctggaatggatcgcccggatcgaccctgccaacggcgactccaagtacgaccctaagttccagggcagagtgaccatgaccgccgacacctccaccaacaccgtgtacatggaactgtcctccctgcggtctgaggacaccgccgtgtactactgcgccaggggcggcatgatctggtacttcgacgtgtggggccagggcaccaccgtgacagtgtcctctggcggcggaggaagtggaggtggaggatctggtggaggcggctccgagatcgtgctgacccagtctcctgccaccctggctgtgtctcccggcgagaaagtgaccctgtcctgctccgcctcctcctccatctcctccaactacctgcactggtatcagcagaagcctggcctgcctcctcggctgctgatctaccggacctccaacctggcctctggcgtgcccgacaggttctccggctctggctccggcaccgacttcaccctgaccatctcccggctggaacctgaggacttcgccacctactactgccagcagggctcctccctgccttacaccttcggacagggcaccaagctggaaatcaagtctggcggagggggctctgaagtgcagctggtggaaagcggagggggactggtgcagcccgggggaagtctgaagctgtcctgtgccgccagcggctttaccttcaacaagtacgccatgaattgggtccgacaggccccagggaaaggcctggaatgggtggcacggatccggtccaagtacaacaactacgccacctactacgctgactccgtgaaggacagattcaccatcagccgggacgactctaagaacaccgcctatctgcagatgaacaacctgaaaaccgaggatacagctgtgtactattgtgtgcggcacggcaacttcggcaactcctacatctcctactgggcctattggggacagggaacactggtcaccgtgtctagcggaggtggcggaagtgggggaggcggatctggcggtggcggatcccagaccgtggtcacccaggaaccttccctgaccgtctccccaggcggcaccgtgaccctgacctgtggctcctctaccggcgctgtgacctccggcaactaccctaactgggtgcagcagaaacccggacaggctcctagaggcctgatcggcggcaccaagtttctggcccctggcacccctgccagattctccggctccctgctgggaggcaaggccgctctgaccctgtctggcgtgcagcctgaggacgaggccgagtactactgtgtgctgtggtactccaacagatgggtgttcggaggcggcacaaagctgaccgtgctg

SEQ ID NO: 887 - protein, 118 aa, Artificial Sequence; identical to SEQ ID NO: 869
  PM08E11-H

SEQ ID NO: 888 - protein, 5 aa, Artificial Sequence
  PM08E11-HCDR1
DTYMD

SEQ ID NO: 889 - protein, 17 aa, Artificial Sequence
  PM08E11-HCDR2
RIDPANGDSKYDPKFQG

SEQ ID NO: 890 - protein, 9 aa, Artificial Sequence
  PM08E11-HCDR3
GGMIWYFDV

SEQ ID NO: 891 - DNA, 354 bp, Artificial Sequence; identical to SEQ ID NO: 873
  PM08E11-H

SEQ ID NO: 892 - protein, 108 aa, Artificial Sequence
  PM08E11-L
EIVLTQSPATMSVSPGERATLSCSASSSISSNYLHWYQQKPGLPPRLLIYRTSNLASGIPDRFSGSGSGTDFTLTISRLEAEDFATYYCQQGSSLPYTFGQGTKLEIK

SEQ ID NO: 893 - protein, 12 aa, Artificial Sequence
  PM08E11-LCDR1
SASSSISSNYLH

SEQ ID NO: 894 - protein, 7 aa, Artificial Sequence
  PM08E11-LCDR2
RTSNLAS

SEQ ID NO: 895 - protein, 9 aa, Artificial Sequence
  PM08E11-LCDR3
QQGSSLPYT

SEQ ID NO: 896 - DNA, 324 bp, Artificial Sequence
  PM08E11-L
gagatcgtgctcacccagtctccagccaccatgtctgtatctcccggggagagggccactctctcctgcagtgccagctcaagtataagttccaattacttgcattggtatcagcagaagccaggattgccccctagactcttgatttataggacatccaatctggcttctggaatcccagatcgcttcagtggcagtgggtctgggaccgatttcactctcacaattagcaggctggaggctgaagattttgccacttactactgccagcagggtagtagtttaccgtacacgttcggacaagggaccaagcttgagatcaaa

SEQ ID NO: 897 - protein, 241 aa, Artificial Sequence
  PM08E11-HL
QVQLVQSGAEVMKPGASVKVSCKASGYTITDTYMDWVRQAPGQGLEWIARIDPANGDSKYDPKFQGRVTMTADTSTNTVYMELSSLRSEDTAVYYCARGGMIWYFDVWGQGTTVTVSSGGGGSGGGGSGGGGSEIVLTQSPATMSVSPGERATLSCSASSSISSNYLHWYQQKPGLPPRLLIYRTSNLASGIPDRFSGSGSGTDFTLTISRLEAEDFATYYCQQGSSLPYTFGQGTKLEIK

SEQ ID NO: 898 - DNA, 723 bp, Artificial Sequence
  PM08E11-HL
caggtgcagctggtccagtctggggcagaggttatgaaaccaggggcctcagtcaaggtgtcctgcaaagcttctggctacaccattacagacacctatatggactgggtgaggcaggcgcctggacagggcctggaatggattgcaaggattgatcctgcgaatggtgatagtaaatatgacccgaaattccagggcagggtcactatgacagcagacacatccaccaacacagtctacatggagctcagcagcctgagatctgaggacactgccgtctattattgtgctagaggcgggatgatatggtacttcgatgtctggggccaagggaccacggtcaccgtctcctcaggtggtggtggttctggcggcggcggctccggtggtggtggttctgagatcgtgctcacccagtctccagccaccatgtctgtatctcccggggagagggccactctctcctgcagtgccagctcaagtataagttccaattacttgcattggtatcagcagaagccaggattgccccctagactcttgatttataggacatccaatctggcttctggaatcccagatcgcttcagtggcagtgggtctgggaccgatttcactctcacaattagcaggctggaggctgaagattttgccacttactactgccagcagggtagtagtttaccgtacacgttcggacaagggaccaagcttgagatcaaa

SEQ ID NO: 899 - protein, 496 aa, Artificial Sequence
  PM08E11 HL X I2C HL
QVQLVQSGAEVMKPGASVKVSCKASGYTITDTYMDWVRQAPGQGLEWIARIDPANGDSKYDPKFQGRVTMTADTSTNTVYMELSSLRSEDTAVYYCARGGMIWYFDVWGQGTTVTVSSGGGGSGGGGSGGGGSEIVLTQSPATMSVSPGERATLSCSASSSISSNYLHWYQQKPGLPPRLLIYRTSNLASGIPDRFSGSGSGTDFTLTISRLEAEDFATYYCQQGSSLPYTFGQGTKLEIKSGGGGSEVQLVESGGGLVQPGGSLKLSCAASGFTFNKYAMNWVRQAPGKGLEWVARIRSKYNNYATYYADSVKDRFTISRDDSKNTAYLQMNNLKTEDTAVYYCVRHGNFGNSYISYWAYWGQGTLVTVSSGGGGSGGGGSGGGGSQTVVTQEPSLTVSPGGTVTLTCGSSTGAVTSGNYPNWVQQKPGQAPRGLIGGTKFLAPGTPARFSGSLLGGKAALTLSGVQPEDEAEYYCVLWYSNRWVFGGGTKLTVL

SEQ ID NO: 900 - DNA, 1488 bp, Artificial Sequence
  PM08E11 HL X I2C HL
caggtgcagctggtccagtctggggcagaggttatgaaaccaggggcctcagtcaaggtgtcctgcaaagcttctggctacaccattacagacacctatatggactgggtgaggcaggcgcctggacagggcctggaatggattgcaaggattgatcctgcgaatggtgatagtaaatatgacccgaaattccagggcagggtcactatgacagcagacacatccaccaacacagtctacatggagctcagcagcctgagatctgaggacactgccgtctattattgtgctagaggcgggatgatatggtacttcgatgtctggggccaagggaccacggtcaccgtctcctcaggtggtggtggttctggcggcggcggctccggtggtggtggttctgagatcgtgctcacccagtctccagccaccatgtctgtatctcccggggagagggccactctctcctgcagtgccagctcaagtataagttccaattacttgcattggtatcagcagaagccaggattgccccctagactcttgatttataggacatccaatctggcttctggaatcccagatcgcttcagtggcagtgggtctgggaccgatttcactctcacaattagcaggctggaggctgaagattttgccacttactactgccagcagggtagtagtttaccgtacacgttcggacaagggaccaagcttgagatcaaatccggaggtggtggatccgaggtgcagctggtcgagtctggaggaggattggtgcagcctggagggtcattgaaactctcatgtgcagcctctggattcaccttcaataagtacgccatgaactgggtccgccaggctccaggaaagggtttggaatgggttgctcgcataagaagtaaatataataattatgcaacatattatgccgattcagtgaaagacaggttcaccatctccagagatgattcaaaaaacactgcctatctacaaatgaacaacttgaaaactgaggacactgccgtgtactactgtgtgagacatgggaacttcggtaatagctacatatcctactgggcttactggggccaagggactctggtcaccgtctcctcaggtggtggtggttctggcggcggcggctccggtggtggtggttctcagactgttgtgactcaggaaccttcactcaccgtatcacctggtggaacagtcacactcacttgtggctcctcgactggggctgttacatctggcaactacccaaactgggtccaacaaaaaccaggtcaggcaccccgtggtctaataggtgggactaagttcctcgcccccggtactcctgccagattctcaggctccctgcttggaggcaaggctgccctcaccctctcaggggtacagccagaggatgaggcagaatattactgtgttctatggtacagcaaccgctgggtgttcggtggaggaaccaaactgactgtccta

SEQ ID NO: 901 - DNA, 354 bp, Artificial Sequence; identical to SEQ ID NO: 883
  PM08E11-H codon optimized

SEQ ID NO: 902 - DNA, 324 bp, Artificial Sequence
  PM08E11-L codon optimized
gagatcgtgctgacccagtctcctgccaccatgtctgtgtctcccggcgagagagccaccctgtcctgctccgcctcctcctccatctcctccaactacctgcactggtatcagcagaagcctggcctgcctcctcggctgctgatctaccggacctccaacctggcctctggcatccccgacaggttctccggctctggctccggcaccgacttcaccctgaccatctcccggctggaagctgaggacttcgccacctactactgccagcagggctcctccctgccttacaccttcggacagggcaccaagctggaaatcaag

SEQ ID NO: 903 - DNA, 723 bp, Artificial Sequence
  PM08E11-HL codon optimized
caggtgcagctggtccagtctggcgccgaagtgatgaagcctggcgcctccgtgaaggtgtcctgcaaggcctccggctacaccatcaccgacacctacatggactgggtgcggcaggctcctggacagggcctggaatggatcgcccggatcgaccctgccaacggcgactccaagtacgaccctaagttccagggcagagtgaccatgaccgccgacacctccaccaacaccgtgtacatggaactgtcctccctgcggtctgaggacaccgccgtgtactactgcgccaggggcggcatgatctggtacttcgacgtgtggggccagggcaccaccgtgacagtgtcctctggcggcggaggaagtggaggtggaggatctggtggaggcggctccgagatcgtgctgacccagtctcctgccaccatgtctgtgtctcccggcgagagagccaccctgtcctgctccgcctcctcctccatctcctccaactacctgcactggtatcagcagaagcctggcctgcctcctcggctgctgatctaccggacctccaacctggcctctggcatccccgacaggttctccggctctggctccggcaccgacttcaccctgaccatctcccggctggaagctgaggacttcgccacctactactgccagcagggctcctccctgccttacaccttcggacagggcaccaagctggaaatcaag

SEQ ID NO: 904 - DNA, 1488 bp, Artificial Sequence
  PM08E11 HL x I2C HL codon optimized
caggtgcagctggtccagtctggcgccgaagtgatgaagcctggcgcctccgtgaaggtgtcctgcaaggcctccggctacaccatcaccgacacctacatggactgggtgcggcaggctcctggacagggcctggaatggatcgcccggatcgaccctgccaacggcgactccaagtacgaccctaagttccagggcagagtgaccatgaccgccgacacctccaccaacaccgtgtacatggaactgtcctccctgcggtctgaggacaccgccgtgtactactgcgccaggggcggcatgatctggtacttcgacgtgtggggccagggcaccaccgtgacagtgtcctctggcggcggaggaagtggaggtggaggatctggtggaggcggctccgagatcgtgctgacccagtctcctgccaccatgtctgtgtctcccggcgagagagccaccctgtcctgctccgcctcctcctccatctcctccaactacctgcactggtatcagcagaagcctggcctgcctcctcggctgctgatctaccggacctccaacctggcctctggcatccccgacaggttctccggctctggctccggcaccgacttcaccctgaccatctcccggctggaagctgaggacttcgccacctactactgccagcagggctcctccctgccttacaccttcggacagggcaccaagctggaaatcaagtctggcggagggggctctgaagtgcagctggtggaaagcggagggggactggtgcagcccgggggaagtctgaagctgtcctgtgccgccagcggctttaccttcaacaagtacgccatgaattgggtccgacaggccccagggaaaggcctggaatgggtggcacggatccggtccaagtacaacaactacgccacctactacgctgactccgtgaaggacagattcaccatcagccgggacgactctaagaacaccgcctatctgcagatgaacaacctgaaaaccgaggatacagctgtgtactattgtgtgcggcacggcaacttcggcaactcctacatctcctactgggcctattggggacagggaacactggtcaccgtgtctagcggaggtggcggaagtgggggaggcggatctggcggtggcggatcccagaccgtggtcacccaggaaccttccctgaccgtctccccaggcggcaccgtgaccctgacctgtggctcctctaccggcgctgtgacctccggcaactaccctaactgggtgcagcagaaacccggacaggctcctagaggcctgatcggcggcaccaagtttctggcccctggcacccctgccagattctccggctccctgctgggaggcaaggccgctctgaccctgtctggcgtgcagcctgaggacgaggccgagtactactgtgtgctgtggtactccaacagatgggtgttcggaggcggcacaaagctgaccgtgctg

SEQ ID NO: 905 - protein, 118 aa, Artificial Sequence
  PM95H6-H
QVQLVQSGAEVMKPGASVKVSCKASGYNFKDTYMDWVKQTPEQGLEWMGRIDPANGDSKYDPKFQGRVTITADTSTNTAYMELSSLRSEDTAVYYCARGGMIWYFDVWGQGTTVTVSS

SEQ ID NO: 906 - protein, 5 aa, Artificial Sequence
  PM95H6-HCDR1
DTYMD

SEQ ID NO: 907 - protein, 17 aa, Artificial Sequence
  PM95H6-HCDR2
RIDPANGDSKYDPKFQG

SEQ ID NO: 908 - protein, 9 aa, Artificial Sequence
  PM95H6-HCDR3
GGMIWYFDV

SEQ ID NO: 909 - DNA, 354 bp, Artificial Sequence
  PM95H6-H
caggtgcagctggtccagtctggggcagaggttatgaagccaggggcctcagtcaaggtgtcctgcaaagcttctggctacaactttaaagacacctatatggactgggtgaagcagacgcctgaacagggcctggaatggatgggaaggattgatcctgcgaatggtgatagtaaatatgacccgaaattccagggcagggtcactataacagcagacacatccaccaacacagcctacatggagctcagcagcctgagatctgaggacactgccgtctattattgtgctagaggcgggatgatatggtacttcgatgtctggggccaagggaccacggtcaccgtctcctca

SEQ ID NO: 910 - protein, 108 aa, Artificial Sequence; identical to SEQ ID NO: 874
  PM95H6-L

SEQ ID NO: 911 - protein, 12 aa, Artificial Sequence
  PM95H6-LCDR1
SASSSISSNYLH

SEQ ID NO: 912 - protein, 7 aa, Artificial Sequence
  PM95H6-LCDR2
RTSNLAS

SEQ ID NO: 913 - protein, 9 aa, Artificial Sequence
  PM95H6-LCDR3
QQGSSLPYT

SEQ ID NO: 914 - DNA, 324 bp, Artificial Sequence; identical to SEQ ID NO: 878
  PM95H6-L

SEQ ID NO: 915 - protein, 241 aa, Artificial Sequence
  PM95H6-HL
QVQLVQSGAEVMKPGASVKVSCKASGYNFKDTYMDWVKQTPEQGLEWMGRIDPANGDSKYDPKFQGRVTITADTSTNTAYMELSSLRSEDTAVYYCARGGMIWYFDVWGQGTTVTVSSGGGGSGGGGSGGGGSEIVLTQSPATLAVSPGEKVTLSCSASSSISSNYLHWYQQKPGLPPRLLIYRTSNLASGVPDRFSGSGSGTDFTLTISRLEPEDFATYYCQQGSSLPYTFGQGTKLEIK

SEQ ID NO: 916 - DNA, 723 bp, Artificial Sequence
  PM95H6-HL
caggtgcagctggtccagtctggggcagaggttatgaagccaggggcctcagtcaaggtgtcctgcaaagcttctggctacaactttaaagacacctatatggactgggtgaagcagacgcctgaacagggcctggaatggatgggaaggattgatcctgcgaatggtgatagtaaatatgacccgaaattccagggcagggtcactataacagcagacacatccaccaacacagcctacatggagctcagcagcctgagatctgaggacactgccgtctattattgtgctagaggcgggatgatatggtacttcgatgtctggggccaagggaccacggtcaccgtctcctcaggtggtggtggttctggcggcggcggctccggtggtggtggttctgagatcgtgctcacccagtctccagccaccctggctgtatctcccggggagaaggtcactctctcctgcagtgccagctcaagtataagttccaattacttgcattggtatcagcagaagccaggattgccccctagactcttgatttataggacatccaatctggcttctggagtcccagatcgcttcagtggcagtgggtctgggaccgatttcactctcacaattagcaggctggagcctgaagattttgccacttactactgccagcagggtagtagtttaccgtacacgttcggacaagggaccaagcttgagatcaaa

SEQ ID NO: 917 - protein, 496 aa, Artificial Sequence
  PM95H6 HL X I2C HL
QVQLVQSGAEVMKPGASVKVSCKASGYNFKDTYMDWVKQTPEQGLEWMGRIDPANGDSKYDPKFQGRVTITADTSTNTAYMELSSLRSEDTAVYYCARGGMIWYFDVWGQGTTVTVSSGGGGSGGGGSGGGGSEIVLTQSPATLAVSPGEKVTLSCSASSSISSNYLHWYQQKPGLPPRLLIYRTSNLASGVPDRFSGSGSGTDFTLTISRLEPEDFATYYCQQGSSLPYTFGQGTKLEIKSGGGGSEVQLVESGGGLVQPGGSLKLSCAASGFTFNKYAMNWVRQAPGKGLEWVARIRSKYNNYATYYADSVKDRFTISRDDSKNTAYLQMNNLKTEDTAVYYCVRHGNFGNSYISYWAYWGQGTLVTVSSGGGGSGGGGSGGGGSQTVVTQEPSLTVSPGGTVTLTCGSSTGAVTSGNYPNWVQQKPGQAPRGLIGGTKFLAPGTPARFSGSLLGGKAALTLSGVQPEDEAEYYCVLWYSNRWVFGGGTKLTVL

SEQ ID NO: 918 - DNA, 1488 bp, Artificial Sequence
  PM95H6 HL X I2C HL
caggtgcagctggtccagtctggggcagaggttatgaagccaggggcctcagtcaaggtgtcctgcaaagcttctggctacaactttaaagacacctatatggactgggtgaagcagacgcctgaacagggcctggaatggatgggaaggattgatcctgcgaatggtgatagtaaatatgacccgaaattccagggcagggtcactataacagcagacacatccaccaacacagcctacatggagctcagcagcctgagatctgaggacactgccgtctattattgtgctagaggcgggatgatatggtacttcgatgtctggggccaagggaccacggtcaccgtctcctcaggtggtggtggttctggcggcggcggctccggtggtggtggttctgagatcgtgctcacccagtctccagccaccctggctgtatctcccggggagaaggtcactctctcctgcagtgccagctcaagtataagttccaattacttgcattggtatcagcagaagccaggattgccccctagactcttgatttataggacatccaatctggcttctggagtcccagatcgcttcagtggcagtgggtctgggaccgatttcactctcacaattagcaggctggagcctgaagattttgccacttactactgccagcagggtagtagtttaccgtacacgttcggacaagggaccaagcttgagatcaaatccggaggtggtggatccgaggtgcagctggtcgagtctggaggaggattggtgcagcctggagggtcattgaaactctcatgtgcagcctctggattcaccttcaataagtacgccatgaactgggtccgccaggctccaggaaagggtttggaatgggttgctcgcataagaagtaaatataataattatgcaacatattatgccgattcagtgaaagacaggttcaccatctccagagatgattcaaaaaacactgcctatctacaaatgaacaacttgaaaactgaggacactgccgtgtactactgtgtgagacatgggaacttcggtaatagctacatatcctactgggcttactggggccaagggactctggtcaccgtctcctcaggtggtggtggttctggcggcggcggctccggtggtggtggttctcagactgttgtgactcaggaaccttcactcaccgtatcacctggtggaacagtcacactcacttgtggctcctcgactggggctgttacatctggcaactacccaaactgggtccaacaaaaaccaggtcaggcaccccgtggtctaataggtgggactaagttcctcgcccccggtactcctgccagattctcaggctccctgcttggaggcaaggctgccctcaccctctcaggggtacagccagaggatgaggcagaatattactgtgttctatggtacagcaaccgctgggtgttcggtggaggaaccaaactgactgtccta

SEQ ID NO: 919 - DNA, 354 bp, Artificial Sequence
  PM95H6-Hcodon optimized
caggtgcagctggtccagtctggcgccgaagtgatgaagcctggcgcctccgtgaaggtgtcctgcaaggcctccggctacaacttcaaggacacctacatggactgggtgaaacagacccctgagcagggcctggaatggatgggccggatcgaccctgccaacggcgactccaagtacgaccctaagttccagggcagagtgaccatcaccgccgacacctccaccaacaccgcctacatggaactgtcctccctgcggtctgaggacaccgccgtgtactactgcgccaggggcggcatgatctggtacttcgacgtgtggggccagggcaccaccgtgacagtgtcctct

SEQ ID NO: 920 - DNA, 324 bp, Artificial Sequence; identical to SEQ ID NO: 884
  PM95H6-Lcodon optimized

SEQ ID NO: 921 - DNA, 723 bp, Artificial Sequence
  PM95H6-HLcodon optimized
caggtgcagctggtccagtctggcgccgaagtgatgaagcctggcgcctccgtgaaggtgtcctgcaaggcctccggctacaacttcaaggacacctacatggactgggtgaaacagacccctgagcagggcctggaatggatgggccggatcgaccctgccaacggcgactccaagtacgaccctaagttccagggcagagtgaccatcaccgccgacacctccaccaacaccgcctacatggaactgtcctccctgcggtctgaggacaccgccgtgtactactgcgccaggggcggcatgatctggtacttcgacgtgtggggccagggcaccaccgtgacagtgtcctctggcggcggaggaagtggaggtggaggatctggtggaggcggctccgagatcgtgctgacccagtctcctgccaccctggctgtgtctcccggcgagaaagtgaccctgtcctgctccgcctcctcctccatctcctccaactacctgcactggtatcagcagaagcctggcctgcctcctcggctgctgatctaccggacctccaacctggcctctggcgtgcccgacaggttctccggctctggctccggcaccgacttcaccctgaccatctcccggctggaacctgaggacttcgccacctactactgccagcagggctcctccctgccttacaccttcggacagggcaccaagctggaaatcaag

SEQ ID NO: 922 - DNA, 1488 bp, Artificial Sequence
  PM95H6 HL x I2C HL codon optimized
caggtgcagctggtccagtctggcgccgaagtgatgaagcctggcgcctccgtgaaggtgtcctgcaaggcctccggctacaacttcaaggacacctacatggactgggtgaaacagacccctgagcagggcctggaatggatgggccggatcgaccctgccaacggcgactccaagtacgaccctaagttccagggcagagtgaccatcaccgccgacacctccaccaacaccgcctacatggaactgtcctccctgcggtctgaggacaccgccgtgtactactgcgccaggggcggcatgatctggtacttcgacgtgtggggccagggcaccaccgtgacagtgtcctctggcggcggaggaagtggaggtggaggatctggtggaggcggctccgagatcgtgctgacccagtctcctgccaccctggctgtgtctcccggcgagaaagtgaccctgtcctgctccgcctcctcctccatctcctccaactacctgcactggtatcagcagaagcctggcctgcctcctcggctgctgatctaccggacctccaacctggcctctggcgtgcccgacaggttctccggctctggctccggcaccgacttcaccctgaccatctcccggctggaacctgaggacttcgccacctactactgccagcagggctcctccctgccttacaccttcggacagggcaccaagctggaaatcaagtctggcggagggggctctgaagtgcagctggtggaaagcggagggggactggtgcagcccgggggaagtctgaagctgtcctgtgccgccagcggctttaccttcaacaagtacgccatgaattgggtccgacaggccccagggaaaggcctggaatgggtggcacggatccggtccaagtacaacaactacgccacctactacgctgactccgtgaaggacagattcaccatcagccgggacgactctaagaacaccgcctatctgcagatgaacaacctgaaaaccgaggatacagctgtgtactattgtgtgcggcacggcaacttcggcaactcctacatctcctactgggcctattggggacagggaacactggtcaccgtgtctagcggaggtggcggaagtgggggaggcggatctggcggtggcggatcccagaccgtggtcacccaggaaccttccctgaccgtctccccaggcggcaccgtgaccctgacctgtggctcctctaccggcgctgtgacctccggcaactaccctaactgggtgcagcagaaacccggacaggctcctagaggcctgatcggcggcaccaagtttctggcccctggcacccctgccagattctccggctccctgctgggaggcaaggccgctctgaccctgtctggcgtgcagcctgaggacgaggccgagtactactgtgtgctgtggtactccaacagatgggtgttcggaggcggcacaaagctgaccgtgctg

SEQ ID NO: 923 - protein, 118 aa, Artificial Sequence; identical to SEQ ID NO: 905
  PM95A8-H

SEQ ID NO: 924 - protein, 5 aa, Artificial Sequence
  PM95A8-HCDR1
DTYMD

SEQ ID NO: 925 - protein, 17 aa, Artificial Sequence
  PM95A8-HCDR2
RIDPANGDSKYDPKFQG

SEQ ID NO: 926 - protein, 9 aa, Artificial Sequence
  PM95A8-HCDR3
GGMIWYFDV

SEQ ID NO: 927 - DNA, 354 bp, Artificial Sequence; identical to SEQ ID NO: 909
  PM95A8-H

SEQ ID NO: 928 - protein, 108 aa, Artificial Sequence; identical to SEQ ID NO: 892
  PM95A8-L

SEQ ID NO: 929 - protein, 12 aa, Artificial Sequence
  PM95A8-LCDR1
SASSSISSNYLH

SEQ ID NO: 930 - protein, 7 aa, Artificial Sequence
  PM95A8-LCDR2
RTSNLAS

SEQ ID NO: 931 - protein, 9 aa, Artificial Sequence
  PM95A8-LCDR3
QQGSSLPYT

SEQ ID NO: 932 - DNA, 324 bp, Artificial Sequence; identical to SEQ ID NO: 896
  PM95A8-L

SEQ ID NO: 933 - protein, 241 aa, Artificial Sequence
  PM95A8-HL
QVQLVQSGAEVMKPGASVKVSCKASGYNFKDTYMDWVKQTPEQGLEWMGRIDPANGDSKYDPKFQGRVTITADTSTNTAYMELSSLRSEDTAVYYCARGGMIWYFDVWGQGTTVTVSSGGGGSGGGGSGGGGSEIVLTQSPATMSVSPGERATLSCSASSSISSNYLHWYQQKPGLPPRLLIYRTSNLASGIPDRFSGSGSGTDFTLTISRLEAEDFATYYCQQGSSLPYTFGQGTKLEIK

SEQ ID NO: 934 - DNA, 723 bp, Artificial Sequence
  PM95A8-HL
caggtgcagctggtccagtctggggcagaggttatgaagccaggggcctcagtcaaggtgtcctgcaaagcttctggctacaactttaaagacacctatatggactgggtgaagcagacgcctgaacagggcctggaatggatgggaaggattgatcctgcgaatggtgatagtaaatatgacccgaaattccagggcagggtcactataacagcagacacatccaccaacacagcctacatggagctcagcagcctgagatctgaggacactgccgtctattattgtgctagaggcgggatgatatggtacttcgatgtctggggccaagggaccacggtcaccgtctcctcaggtggtggtggttctggcggcggcggctccggtggtggtggttctgagatcgtgctcacccagtctccagccaccatgtctgtatctcccggggagagggccactctctcctgcagtgccagctcaagtataagttccaattacttgcattggtatcagcagaagccaggattgccccctagactcttgatttataggacatccaatctggcttctggaatcccagatcgcttcagtggcagtgggtctgggaccgatttcactctcacaattagcaggctggaggctgaagattttgccacttactactgccagcagggtagtagtttaccgtacacgttcggacaagggaccaagcttgagatcaaa

SEQ ID NO: 935 - protein, 496 aa, Artificial Sequence
  PM95A8 HL X I2C HL
QVQLVQSGAEVMKPGASVKVSCKASGYNFKDTYMDWVKQTPEQGLEWMGRIDPANGDSKYDPKFQGRVTITADTSTNTAYMELSSLRSEDTAVYYCARGGMIWYFDVWGQGTTVTVSSGGGGSGGGGSGGGGSEIVLTQSPATMSVSPGERATLSCSASSSISSNYLHWYQQKPGLPPRLLIYRTSNLASGIPDRFSGSGSGTDFTLTISRLEAEDFATYYCQQGSSLPYTFGQGTKLEIKSGGGGSEVQLVESGGGLVQPGGSLKLSCAASGFTFNKYAMNWVRQAPGKGLEWVARIRSKYNNYATYYADSVKDRFTISRDDSKNTAYLQMNNLKTEDTAVYYCVRHGNFGNSYISYWAYWGQGTLVTVSSGGGGSGGGGSGGGGSQTVVTQEPSLTVSPGGTVTLTCGSSTGAVTSGNYPNWVQQKPGQAPRGLIGGTKFLAPGTPARFSGSLLGGKAALTLSGVQPEDEAEYYCVLWYSNRWVFGGGTKLTVL

SEQ ID NO: 936 - DNA, 1488 bp, Artificial Sequence
  PM95A8 HL X I2C HL
caggtgcagctggtccagtctggggcagaggttatgaagccaggggcctcagtcaaggtgtcctgcaaagcttctggctacaactttaaagacacctatatggactgggtgaagcagacgcctgaacagggcctggaatggatgggaaggattgatcctgcgaatggtgatagtaaatatgacccgaaattccagggcagggtcactataacagcagacacatccaccaacacagcctacatggagctcagcagcctgagatctgaggacactgccgtctattattgtgctagaggcgggatgatatggtacttcgatgtctggggccaagggaccacggtcaccgtctcctcaggtggtggtggttctggcggcggcggctccggtggtggtggttctgagatcgtgctcacccagtctccagccaccatgtctgtatctcccggggagagggccactctctcctgcagtgccagctcaagtataagttccaattacttgcattggtatcagcagaagccaggattgccccctagactcttgatttataggacatccaatctggcttctggaatcccagatcgcttcagtggcagtgggtctgggaccgatttcactctcacaattagcaggctggaggctgaagattttgccacttactactgccagcagggtagtagtttaccgtacacgttcggacaagggaccaagcttgagatcaaatccggaggtggtggatccgaggtgcagctggtcgagtctggaggaggattggtgcagcctggagggtcattgaaactctcatgtgcagcctctggattcaccttcaataagtacgccatgaactgggtccgccaggctccaggaaagggtttggaatgggttgctcgcataagaagtaaatataataattatgcaacatattatgccgattcagtgaaagacaggttcaccatctccagagatgattcaaaaaacactgcctatctacaaatgaacaacttgaaaactgaggacactgccgtgtactactgtgtgagacatgggaacttcggtaatagctacatatcctactgggcttactggggccaagggactctggtcaccgtctcctcaggtggtggtggttctggcggcggcggctccggtggtggtggttctcagactgttgtgactcaggaaccttcactcaccgtatcacctggtggaacagtcacactcacttgtggctcctcgactggggctgttacatctggcaactacccaaactgggtccaacaaaaaccaggtcaggcaccccgtggtctaataggtgggactaagttcctcgcccccggtactcctgccagattctcaggctccctgcttggaggcaaggctgccctcaccctctcaggggtacagccagaggatgaggcagaatattactgtgttctatggtacagcaaccgctgggtgttcggtggaggaaccaaactgactgtccta

SEQ ID NO: 937 - DNA, 354 bp, Artificial Sequence; identical to SEQ ID NO: 919
  PM95A8-Hcodon optimized

SEQ ID NO: 938 - DNA, 324 bp, Artificial Sequence
  PM95A8-HCDR1codon optimized
gagatcgtgctgacccagtctcctgccaccatgtccgtgtctcccggcgagagggctaccctgtcctgctccgcctcctcctccatctcctccaactacctgcactggtatcagcagaagcctggcctgcctcctcggctgctgatctaccggacctccaacctggcctctggcatccccgacaggttctccggctctggctccggcaccgacttcaccctgaccatctcccggctggaagctgaggacttcgccacctactactgccagcagggctcctccctgccttacaccttcggacagggcaccaagctggaaatcaag

SEQ ID NO: 939 - DNA, 723 bp, Artificial Sequence
  PM95A8-HCDR2codon optimized
caggtgcagctggtccagtctggcgccgaagtgatgaagcctggcgcctccgtgaaggtgtcctgcaaggcctccggctacaacttcaaggacacctacatggactgggtgaaacagacccctgagcagggcctggaatggatgggccggatcgaccctgccaacggcgactccaagtacgaccctaagttccagggcagagtgaccatcaccgccgacacctccaccaacaccgcctacatggaactgtcctccctgcggtctgaggacaccgccgtgtactactgcgccaggggcggcatgatctggtacttcgacgtgtggggccagggcaccaccgtgacagtgtcctctggcggcggaggaagtggaggtggaggatctggtggaggcggctccgagatcgtgctgacccagtctcctgccaccatgtccgtgtctcccggcgagagggctaccctgtcctgctccgcctcctcctccatctcctccaactacctgcactggtatcagcagaagcctggcctgcctcctcggctgctgatctaccggacctccaacctggcctctggcatccccgacaggttctccggctctggctccggcaccgacttcaccctgaccatctcccggctggaagctgaggacttcgccacctactactgccagcagggctcctccctgccttacaccttcggacagggcaccaagctggaaatcaag

SEQ ID NO: 940 - DNA, 1488 bp, Artificial Sequence
  PM95A8 HL x I2C HL codon optimized
caggtgcagctggtccagtctggcgccgaagtgatgaagcctggcgcctccgtgaaggtgtcctgcaaggcctccggctacaacttcaaggacacctacatggactgggtgaaacagacccctgagcagggcctggaatggatgggccggatcgaccctgccaacggcgactccaagtacgaccctaagttccagggcagagtgaccatcaccgccgacacctccaccaacaccgcctacatggaactgtcctccctgcggtctgaggacaccgccgtgtactactgcgccaggggcggcatgatctggtacttcgacgtgtggggccagggcaccaccgtgacagtgtcctctggcggcggaggaagtggaggtggaggatctggtggaggcggctccgagatcgtgctgacccagtctcctgccaccatgtccgtgtctcccggcgagagggctaccctgtcctgctccgcctcctcctccatctcctccaactacctgcactggtatcagcagaagcctggcctgcctcctcggctgctgatctaccggacctccaacctggcctctggcatccccgacaggttctccggctctggctccggcaccgacttcaccctgaccatctcccggctggaagctgaggacttcgccacctactactgccagcagggctcctccctgccttacaccttcggacagggcaccaagctggaaatcaagtctggcggagggggctctgaagtgcagctggtggaaagcggagggggactggtgcagcccgggggaagtctgaagctgtcctgtgccgccagcggctttaccttcaacaagtacgccatgaattgggtccgacaggccccagggaaaggcctggaatgggtggcacggatccggtccaagtacaacaactacgccacctactacgctgactccgtgaaggacagattcaccatcagccgggacgactctaagaacaccgcctatctgcagatgaacaacctgaaaaccgaggatacagctgtgtactattgtgtgcggcacggcaacttcggcaactcctacatctcctactgggcctattggggacagggaacactggtcaccgtgtctagcggaggtggcggaagtgggggaggcggatctggcggtggcggatcccagaccgtggtcacccaggaaccttccctgaccgtctccccaggcggcaccgtgaccctgacctgtggctcctctaccggcgctgtgacctccggcaactaccctaactgggtgcagcagaaacccggacaggctcctagaggcctgatcggcggcaccaagtttctggcccctggcacccctgccagattctccggctccctgctgggaggcaaggccgctctgaccctgtctggcgtgcagcctgaggacgaggccgagtactactgtgtgctgtggtactccaacagatgggtgttcggaggcggcacaaagctgaccgtgctg

SEQ ID NO: 941 - protein, 121 aa, Artificial Sequence
  PM07A12-H
QVQLVESGGGLVKPGGSLRLSCAASGFTFSDYYMSWVRQAPGKGLEWVASISDGGSNTYYSDIIKGRFTISRDNAKNNLYLQMNSLRAEDTAVYYCARGFPLLRHGAFDYWGQGTLVTVSS

SEQ ID NO: 942 - protein, 5 aa, Artificial Sequence
  PM07A12-HCDR1
DYYMS

SEQ ID NO: 943 - protein, 17 aa, Artificial Sequence
  PM07A12-HCDR2
SISDGGSNTYYSDIIKG

SEQ ID NO: 944 - protein, 12 aa, Artificial Sequence
  PM07A12-HCDR3
GFPLLRHGAFDY

SEQ ID NO: 945 - DNA, 363 bp, Artificial Sequence
  PM07A12-H
caggtgcagctggtcgagtctggcggcggactggtgaagcctggcgggtccctgaggctgtcctgtgccgcctccggcttcaccttctccgactactacatgagctgggtccgccaggcccctgggaaggggctggaatgggtggcctccatctccgacggcggctccaacacctactactccgacatcatcaagggccggttcaccatctcccgggacaacgccaagaacaatctgtacctgcagatgaactccctgagggccgaggacaccgccgtgtactactgcgcccggggcttccctctgctgagacacggcgccttcgattactggggccagggcaccctggtcaccgtctcctca

SEQ ID NO: 946 - protein, 107 aa, Artificial Sequence
  PM07A12-L
DIQMTQSPSSLSASVGDRVTITCRASQNVDTNVAWYQQKPGQAPKSLIYSATYRYSDVPSRFSGSASGTDFTLTISSVQSEDFATYYCQQYNSYPYTFGGGTKLEIK

SEQ ID NO: 947 - protein, 11 aa, Artificial Sequence
  PM07A12-LCDR1
RASQNVDTNVA

SEQ ID NO: 948 - protein, 7 aa, Artificial Sequence
  PM07A12-LCDR2
SATYRYS

SEQ ID NO: 949 - protein, 9 aa, Artificial Sequence
  PM07A12-LCDR3
QQYNSYPYT

SEQ ID NO: 950 - DNA, 321 bp, Artificial Sequence
  PM07A12-L
gacatccagatgacccagtcccccagctccctgtccgcctccgtgggcgacagagtgaccatcacctgcagggcctcccagaacgtggacaccaacgtggcctggtatcagcagaagcccggccaggcccctaagtccctgatctactccgccacctaccggtactctgacgtgccttcccggttctccggctccgcgtccggcaccgacttcaccctgaccatctccagcgtgcagtctgaggacttcgccacgtactactgccagcagtacaactcctacccttacaccttcggcggagggaccaagctggaaatcaag

SEQ ID NO: 951 - protein, 243 aa, Artificial Sequence
  PM07A12-HL
QVQLVESGGGLVKPGGSLRLSCAASGFTFSDYYMSWVRQAPGKGLEWVASISDGGSNTYYSDIIKGRFTISRDNAKNNLYLQMNSLRAEDTAVYYCARGFPLLRHGAFDYWGQGTLVTVSSGGGGSGGGGSGGGGSDIQMTQSPSSLSASVGDRVTITCRASQNVDTNVAWYQQKPGQAPKSLIYSATYRYSDVPSRFSGSASGTDFTLTISSVQSEDFATYYCQQYNSYPYTFGGGTKLEIK

SEQ ID NO: 952 - DNA, 729 bp, Artificial Sequence
  PM07A12-HL
caggtgcagctggtcgagtctggcggcggactggtgaagcctggcgggtccctgaggctgtcctgtgccgcctccggcttcaccttctccgactactacatgagctgggtccgccaggcccctgggaaggggctggaatgggtggcctccatctccgacggcggctccaacacctactactccgacatcatcaagggccggttcaccatctcccgggacaacgccaagaacaatctgtacctgcagatgaactccctgagggccgaggacaccgccgtgtactactgcgcccggggcttccctctgctgagacacggcgccttcgattactggggccagggcaccctggtcaccgtctcctcaggtggtggtggttctggcggcggcggctccggtggtggtggttctgacatccagatgacccagtcccccagctccctgtccgcctccgtgggcgacagagtgaccatcacctgcagggcctcccagaacgtggacaccaacgtggcctggtatcagcagaagcccggccaggcccctaagtccctgatctactccgccacctaccggtactctgacgtgccttcccggttctccggctccgcgtccggcaccgacttcaccctgaccatctccagcgtgcagtctgaggacttcgccacgtactactgccagcagtacaactcctacccttacaccttcggcggagggaccaagctggaaatcaag

SEQ ID NO: 953 - protein, 498 aa, Artificial Sequence
  PM07A12 HL X I2C HL
QVQLVESGGGLVKPGGSLRLSCAASGFTFSDYYMSWVRQAPGKGLEWVASISDGGSNTYYSDIIKGRFTISRDNAKNNLYLQMNSLRAEDTAVYYCARGFPLLRHGAFDYWGQGTLVTVSSGGGGSGGGGSGGGGSDIQMTQSPSSLSASVGDRVTITCRASQNVDTNVAWYQQKPGQAPKSLIYSATYRYSDVPSRFSGSASGTDFTLTISSVQSEDFATYYCQQYNSYPYTFGGGTKLEIKSGGGGSEVQLVESGGGLVQPGGSLKLSCAASGFTFNKYAMNWVRQAPGKGLEWVARIRSKYNNYATYYADSVKDRFTISRDDSKNTAYLQMNNLKTEDTAVYYCVRHGNFGNSYISYWAYWGQGTLVTVSSGGGGSGGGGSGGGGSQTVVTQEPSLTVSPGGTVTLTCGSSTGAVTSGNYPNWVQQKPGQAPRGLIGGTKFLAPGTPARFSGSLLGGKAALTLSGVQPEDEAEYYCVLWYSNRWVFGGGTKLTVL

SEQ ID NO: 954 - DNA, 1494 bp, Artificial Sequence
  PM07A12 HL X I2C HL
caggtgcagctggtcgagtctggcggcggactggtgaagcctggcgggtccctgaggctgtcctgtgccgcctccggcttcaccttctccgactactacatgagctgggtccgccaggcccctgggaaggggctggaatgggtggcctccatctccgacggcggctccaacacctactactccgacatcatcaagggccggttcaccatctcccgggacaacgccaagaacaatctgtacctgcagatgaactccctgagggccgaggacaccgccgtgtactactgcgcccggggcttccctctgctgagacacggcgccttcgattactggggccagggcaccctggtcaccgtctcctcaggtggtggtggttctggcggcggcggctccggtggtggtggttctgacatccagatgacccagtcccccagctccctgtccgcctccgtgggcgacagagtgaccatcacctgcagggcctcccagaacgtggacaccaacgtggcctggtatcagcagaagcccggccaggcccctaagtccctgatctactccgccacctaccggtactctgacgtgccttcccggttctccggctccgcgtccggcaccgacttcaccctgaccatctccagcgtgcagtctgaggacttcgccacgtactactgccagcagtacaactcctacccttacaccttcggcggagggaccaagctggaaatcaagtccggaggtggtggatccgaggtgcagctggtcgagtctggaggaggattggtgcagcctggagggtcattgaaactctcatgtgcagcctctggattcaccttcaataagtacgccatgaactgggtccgccaggctccaggaaagggtttggaatgggttgctcgcataagaagtaaatataataattatgcaacatattatgccgattcagtgaaagacaggttcaccatctccagagatgattcaaaaaacactgcctatctacaaatgaacaacttgaaaactgaggacactgccgtgtactactgtgtgagacatgggaacttcggtaatagctacatatcctactgggcttactggggccaagggactctggtcaccgtctcctcaggtggtggtggttctggcggcggcggctccggtggtggtggttctcagactgttgtgactcaggaaccttcactcaccgtatcacctggtggaacagtcacactcacttgtggctcctcgactggggctgttacatctggcaactacccaaactgggtccaacaaaaaccaggtcaggcaccccgtggtctaataggtgggactaagttcctcgcccccggtactcctgccagattctcaggctccctgcttggaggcaaggctgccctcaccctctcaggggtacagccagaggatgaggcagaatattactgtgttctatggtacagcaaccgctgggtgttcggtggaggaaccaaactgactgtccta

SEQ ID NO: 955 - DNA, 363 bp, Artificial Sequence
  PM07A12-Hcodon optimized
caggtgcagctggtcgagtctggcggcggactggtcaagcctggcggctccctgagactgtcttgcgctgcctccggcttcaccttctccgactactacatgtcctgggtccgccaggctcctggcaagggactggaatgggtggcctccatctccgacggcggctccaacacctactactccgacatcatcaagggccggttcaccatctccagggacaacgctaagaacaacctgtacctgcagatgaactccctgagggccgaggacaccgccgtgtactactgcgccaggggcttcccactgctgagacacggcgccttcgattactggggccagggcaccctggtcacagtgtcctct

SEQ ID NO: 956 - DNA, 321 bp, Artificial Sequence
  PM07A12-Lcodon optimized
gacatccagatgacccagtccccatcctccctgtctgcctccgtgggcgacagagtgaccatcacatgccgggcctcccagaacgtggacaccaacgtggcatggtatcagcagaagccaggccaggcccctaagtccctgatctactctgccacctaccggtactccgacgtgccctccaggttctctggctccgcctctggcaccgacttcaccctgaccatctcttccgtgcagtccgaggacttcgctacctactactgccagcagtacaactcctacccttacaccttcggcggaggcaccaagctggaaatcaag

SEQ ID NO: 957 - DNA, 729 bp, Artificial Sequence
  PM07A12-HLcodon optimized
caggtgcagctggtcgagtctggcggcggactggtcaagcctggcggctccctgagactgtcttgcgctgcctccggcttcaccttctccgactactacatgtcctgggtccgccaggctcctggcaagggactggaatgggtggcctccatctccgacggcggctccaacacctactactccgacatcatcaagggccggttcaccatctccagggacaacgctaagaacaacctgtacctgcagatgaactccctgagggccgaggacaccgccgtgtactactgcgccaggggcttcccactgctgagacacggcgccttcgattactggggccagggcaccctggtcacagtgtcctctggcggaggcggaagtggaggcggaggaagcggaggcggcggatccgacatccagatgacccagtccccatcctccctgtctgcctccgtgggcgacagagtgaccatcacatgccgggcctcccagaacgtggacaccaacgtggcatggtatcagcagaagccaggccaggcccctaagtccctgatctactctgccacctaccggtactccgacgtgccctccaggttctctggctccgcctctggcaccgacttcaccctgaccatctcttccgtgcagtccgaggacttcgctacctactactgccagcagtacaactcctacccttacaccttcggcggaggcaccaagctggaaatcaag

SEQ ID NO: 958 - DNA, 1494 bp, Artificial Sequence
  PM07A12 HL x I2C HL codon optimized
caggtgcagctggtcgagtctggcggcggactggtcaagcctggcggctccctgagactgtcttgcgctgcctccggcttcaccttctccgactactacatgtcctgggtccgccaggctcctggcaagggactggaatgggtggcctccatctccgacggcggctccaacacctactactccgacatcatcaagggccggttcaccatctccagggacaacgctaagaacaacctgtacctgcagatgaactccctgagggccgaggacaccgccgtgtactactgcgccaggggcttcccactgctgagacacggcgccttcgattactggggccagggcaccctggtcacagtgtcctctggcggaggcggaagtggaggcggaggaagcggaggcggcggatccgacatccagatgacccagtccccatcctccctgtctgcctccgtgggcgacagagtgaccatcacatgccgggcctcccagaacgtggacaccaacgtggcatggtatcagcagaagccaggccaggcccctaagtccctgatctactctgccacctaccggtactccgacgtgccctccaggttctctggctccgcctctggcaccgacttcaccctgaccatctcttccgtgcagtccgaggacttcgctacctactactgccagcagtacaactcctacccttacaccttcggcggaggcaccaagctggaaatcaagtccggcggagggggctctgaagtgcagctggtggaaagcggagggggactggtgcagcccgggggaagtctgaagctgtcctgtgccgccagcggctttaccttcaacaagtacgccatgaattgggtccgacaggccccagggaaaggcctggaatgggtggcacggatccggtccaagtacaacaactacgccacctactacgctgactccgtgaaggacagattcaccatcagccgggacgactctaagaacaccgcctatctgcagatgaacaacctgaaaaccgaggatacagctgtgtactattgtgtgcggcacggcaacttcggcaactcctacatctcctactgggcctattggggacagggaacactggtcaccgtgtctagcggaggtggcggaagtgggggaggcggatctggcggtggcggatcccagaccgtggtcacccaggaaccttccctgaccgtctccccaggcggcaccgtgaccctgacctgtggctcctctaccggcgctgtgacctccggcaactaccctaactgggtgcagcagaaacccggacaggctcctagaggcctgatcggcggcaccaagtttctggcccctggcacccctgccagattctccggctccctgctgggaggcaaggccgctctgaccctgtctggcgtgcagcctgaggacgaggccgagtactactgtgtgctgtggtactccaacagatgggtgttcggaggcggcacaaagctgaccgtgctg

SEQ ID NO: 959 - protein, 121 aa, Artificial Sequence
  PM07F8-H
QVQLVESGGGLVKPGESLRLSCAASGFTFSDYYMSWVRQAPGKGLEWVASISDGGSNTYYSDIIKGRFTISRDNAKNSLYLQMNSLKAEDTAVYYCARGFPLLRHGAFDYWGQGTLVTVSS

SEQ ID NO: 960 - protein, 5 aa, Artificial Sequence
  PM07F8-HCDR1
DYYMS

SEQ ID NO: 961 - protein, 17 aa, Artificial Sequence
  PM07F8-HCDR2
SISDGGSNTYYSDIIKG

SEQ ID NO: 962 - protein, 12 aa, Artificial Sequence
  PM07F8-HCDR3
GFPLLRHGAFDY

SEQ ID NO: 963 - DNA, 363 bp, Artificial Sequence
  PM07F8-H
caggtgcagctggtcgagtctggcggcggactggtgaagcctggcgagtccctgaggctgtcctgtgccgcctccggcttcaccttctccgactactacatgagctgggtccgccaggcccctgggaaggggctggaatgggtggcctccatctccgacggcggctccaacacctactactccgacatcatcaagggccggttcaccatctcccgggacaacgccaagaacagcctgtacctgcagatgaactccctgaaggccgaggacaccgccgtgtactactgcgcccggggcttccctctgctgagacacggcgccttcgattactggggccagggcaccctggtcaccgtctcctca

SEQ ID NO: 964 - protein, 107 aa, Artificial Sequence; identical to SEQ ID NO: 946
  PM07F8-L

SEQ ID NO: 965 - protein, 11 aa, Artificial Sequence
  PM07F8-LCDR1
RASQNVDTNVA

SEQ ID NO: 966 - protein, 7 aa, Artificial Sequence
  PM07F8-LCDR2
SATYRYS

SEQ ID NO: 967 - protein, 9 aa, Artificial Sequence
  PM07F8-LCDR3
QQYNSYPYT

SEQ ID NO: 968 - DNA, 321 bp, Artificial Sequence; identical to SEQ ID NO: 950
  PM07F8-L

SEQ ID NO: 969 - protein, 243 aa, Artificial Sequence
  PM07F8-HL
QVQLVESGGGLVKPGESLRLSCAASGFTFSDYYMSWVRQAPGKGLEWVASISDGGSNTYYSDIIKGRFTISRDNAKNSLYLQMNSLKAEDTAVYYCARGFPLLRHGAFDYWGQGTLVTVSSGGGGSGGGGSGGGGSDIQMTQSPSSLSASVGDRVTITCRASQNVDTNVAWYQQKPGQAPKSLIYSATYRYSDVPSRFSGSASGTDFTLTISSVQSEDFATYYCQQYNSYPYTFGGGTKLEIK

SEQ ID NO: 970 - DNA, 729 bp, Artificial Sequence
  PM07F8-HL
caggtgcagctggtcgagtctggcggcggactggtgaagcctggcgagtccctgaggctgtcctgtgccgcctccggcttcaccttctccgactactacatgagctgggtccgccaggcccctgggaaggggctggaatgggtggcctccatctccgacggcggctccaacacctactactccgacatcatcaagggccggttcaccatctcccgggacaacgccaagaacagcctgtacctgcagatgaactccctgaaggccgaggacaccgccgtgtactactgcgcccggggcttccctctgctgagacacggcgccttcgattactggggccagggcaccctggtcaccgtctcctcaggtggtggtggttctggcggcggcggctccggtggtggtggttctgacatccagatgacccagtcccccagctccctgtccgcctccgtgggcgacagagtgaccatcacctgcagggcctcccagaacgtggacaccaacgtggcctggtatcagcagaagcccggccaggcccctaagtccctgatctactccgccacctaccggtactctgacgtgccttcccggttctccggctccgcgtccggcaccgacttcaccctgaccatctccagcgtgcagtctgaggacttcgccacgtactactgccagcagtacaactcctacccttacaccttcggcggagggaccaagctggaaatcaag

SEQ ID NO: 971 - protein, 498 aa, Artificial Sequence
  PM07F8 HL X I2C HL
QVQLVESGGGLVKPGESLRLSCAASGFTFSDYYMSWVRQAPGKGLEWVASISDGGSNTYYSDIIKGRFTISRDNAKNSLYLQMNSLKAEDTAVYYCARGFPLLRHGAFDYWGQGTLVTVSSGGGGSGGGGSGGGGSDIQMTQSPSSLSASVGDRVTITCRASQNVDTNVAWYQQKPGQAPKSLIYSATYRYSDVPSRFSGSASGTDFTLTISSVQSEDFATYYCQQYNSYPYTFGGGTKLEIKSGGGGSEVQLVESGGGLVQPGGSLKLSCAASGFTFNKYAMNWVRQAPGKGLEWVARIRSKYNNYATYYADSVKDRFTISRDDSKNTAYLQMNNLKTEDTAVYYCVRHGNFGNSYISYWAYWGQGTLVTVSSGGGGSGGGGSGGGGSQTVVTQEPSLTVSPGGTVTLTCGSSTGAVTSGNYPNWVQQKPGQAPRGLIGGTKFLAPGTPARFSGSLLGGKAALTLSGVQPEDEAEYYCVLWYSNRWVFGGGTKLTVL

SEQ ID NO: 972 - DNA, 1494 bp, Artificial Sequence
  PM07F8 HL X I2C HL
caggtgcagctggtcgagtctggcggcggactggtgaagcctggcgagtccctgaggctgtcctgtgccgcctccggcttcaccttctccgactactacatgagctgggtccgccaggcccctgggaaggggctggaatgggtggcctccatctccgacggcggctccaacacctactactccgacatcatcaagggccggttcaccatctcccgggacaacgccaagaacagcctgtacctgcagatgaactccctgaaggccgaggacaccgccgtgtactactgcgcccggggcttccctctgctgagacacggcgccttcgattactggggccagggcaccctggtcaccgtctcctcaggtggtggtggttctggcggcggcggctccggtggtggtggttctgacatccagatgacccagtcccccagctccctgtccgcctccgtgggcgacagagtgaccatcacctgcagggcctcccagaacgtggacaccaacgtggcctggtatcagcagaagcccggccaggcccctaagtccctgatctactccgccacctaccggtactctgacgtgccttcccggttctccggctccgcgtccggcaccgacttcaccctgaccatctccagcgtgcagtctgaggacttcgccacgtactactgccagcagtacaactcctacccttacaccttcggcggagggaccaagctggaaatcaagtccggaggtggtggatccgaggtgcagctggtcgagtctggaggaggattggtgcagcctggagggtcattgaaactctcatgtgcagcctctggattcaccttcaataagtacgccatgaactgggtccgccaggctccaggaaagggtttggaatgggttgctcgcataagaagtaaatataataattatgcaacatattatgccgattcagtgaaagacaggttcaccatctccagagatgattcaaaaaacactgcctatctacaaatgaacaacttgaaaactgaggacactgccgtgtactactgtgtgagacatgggaacttcggtaatagctacatatcctactgggcttactggggccaagggactctggtcaccgtctcctcaggtggtggtggttctggcggcggcggctccggtggtggtggttctcagactgttgtgactcaggaaccttcactcaccgtatcacctggtggaacagtcacactcacttgtggctcctcgactggggctgttacatctggcaactacccaaactgggtccaacaaaaaccaggtcaggcaccccgtggtctaataggtgggactaagttcctcgcccccggtactcctgccagattctcaggctccctgcttggaggcaaggctgccctcaccctctcaggggtacagccagaggatgaggcagaatattactgtgttctatggtacagcaaccgctgggtgttcggtggaggaaccaaactgactgtccta

SEQ ID NO: 973 - DNA, 363 bp, Artificial Sequence
  PM07F8-Hcodon optimized
caggtgcagctggtcgagtctggcggcggactggtcaagcctggcgagtccctgagactgtcttgcgctgcctccggcttcaccttctccgactactacatgtcctgggtccgccaggctcctggcaagggactggaatgggtggcctccatctccgacggcggctccaacacctactactccgacatcatcaagggccggttcaccatctccagggacaacgccaagaactccctgtacctgcagatgaactccctgaaggccgaggacaccgccgtgtactactgcgccaggggcttcccactgctgagacacggcgccttcgattactggggccagggcaccctggtcacagtgtcctct

SEQ ID NO: 974 - DNA, 321 bp, Artificial Sequence; identical to SEQ ID NO: 956
  PM07F8-Hcodon optimized

SEQ ID NO: 975 - DNA, 729 bp, Artificial Sequence
  PM07F8-Hcodon optimized
caggtgcagctggtcgagtctggcggcggactggtcaagcctggcgagtccctgagactgtcttgcgctgcctccggcttcaccttctccgactactacatgtcctgggtccgccaggctcctggcaagggactggaatgggtggcctccatctccgacggcggctccaacacctactactccgacatcatcaagggccggttcaccatctccagggacaacgccaagaactccctgtacctgcagatgaactccctgaaggccgaggacaccgccgtgtactactgcgccaggggcttcccactgctgagacacggcgccttcgattactggggccagggcaccctggtcacagtgtcctctggcggaggcggaagtggaggcggaggaagcggaggcggcggatccgacatccagatgacccagtccccatcctccctgtctgcctccgtgggcgacagagtgaccatcacatgccgggcctcccagaacgtggacaccaacgtggcatggtatcagcagaagccaggccaggcccctaagtccctgatctactctgccacctaccggtactccgacgtgccctccaggttctctggctccgcctctggcaccgacttcaccctgaccatctcttccgtgcagtccgaggacttcgctacctactactgccagcagtacaactcctacccttacaccttcggcggaggcaccaagctggaaatcaag

SEQ ID NO: 976 - DNA, 1494 bp, Artificial Sequence
  PM07F8 HL x I2C HL codon optimized
caggtgcagctggtcgagtctggcggcggactggtcaagcctggcgagtccctgagactgtcttgcgctgcctccggcttcaccttctccgactactacatgtcctgggtccgccaggctcctggcaagggactggaatgggtggcctccatctccgacggcggctccaacacctactactccgacatcatcaagggccggttcaccatctccagggacaacgccaagaactccctgtacctgcagatgaactccctgaaggccgaggacaccgccgtgtactactgcgccaggggcttcccactgctgagacacggcgccttcgattactggggccagggcaccctggtcacagtgtcctctggcggaggcggaagtggaggcggaggaagcggaggcggcggatccgacatccagatgacccagtccccatcctccctgtctgcctccgtgggcgacagagtgaccatcacatgccgggcctcccagaacgtggacaccaacgtggcatggtatcagcagaagccaggccaggcccctaagtccctgatctactctgccacctaccggtactccgacgtgccctccaggttctctggctccgcctctggcaccgacttcaccctgaccatctcttccgtgcagtccgaggacttcgctacctactactgccagcagtacaactcctacccttacaccttcggcggaggcaccaagctggaaatcaagtccggcggagggggctctgaagtgcagctggtggaaagcggagggggactggtgcagcccgggggaagtctgaagctgtcctgtgccgccagcggctttaccttcaacaagtacgccatgaattgggtccgacaggccccagggaaaggcctggaatgggtggcacggatccggtccaagtacaacaactacgccacctactacgctgactccgtgaaggacagattcaccatcagccgggacgactctaagaacaccgcctatctgcagatgaacaacctgaaaaccgaggatacagctgtgtactattgtgtgcggcacggcaacttcggcaactcctacatctcctactgggcctattggggacagggaacactggtcaccgtgtctagcggaggtggcggaagtgggggaggcggatctggcggtggcggatcccagaccgtggtcacccaggaaccttccctgaccgtctccccaggcggcaccgtgaccctgacctgtggctcctctaccggcgctgtgacctccggcaactaccctaactgggtgcagcagaaacccggacaggctcctagaggcctgatcggcggcaccaagtttctggcccctggcacccctgccagattctccggctccctgctgggaggcaaggccgctctgaccctgtctggcgtgcagcctgaggacgaggccgagtactactgtgtgctgtggtactccaacagatgggtgttcggaggcggcacaaagctgaccgtgctg

SEQ ID NO: 977 - protein, 121 aa, Artificial Sequence
  PM07E5-H
QVQLVESGGGLVKPGGSLRLSCAASGFTFSDYYMSWVRQAPGKGLEWVASISDGGSNTYYSDIIKGRFTISRDNAKNNLYLQMNSLRAEDTAVYYCARGFPLLRHGAIDYWGQGTLVTVSS

SEQ ID NO: 978 - protein, 5 aa, Artificial Sequence
  PM07E5-HCDR1
DYYMS

SEQ ID NO: 979 - protein, 17 aa, Artificial Sequence
  PM07E5-HCDR2
SISDGGSNTYYSDIIKG

SEQ ID NO: 980 - protein, 12 aa, Artificial Sequence
  PM07E5-HCDR3
GFPLLRHGAIDY

SEQ ID NO: 981 - DNA, 363 bp, Artificial Sequence
  PM07E5-H
caggtgcagctggtcgagtctggcggcggactggtgaagcctggcgggtccctgaggctgtcctgtgccgcctccggcttcaccttctccgactactacatgagctgggtccgccaggcccctgggaaggggctggaatgggtggcctccatctccgacggcggctccaacacctactactccgacatcatcaagggccggttcaccatctcccgagacaacgccaagaacaatctgtacctgcagatgaactccctgagggccgaggacaccgccgtgtactactgcgcccggggcttccctctgctgagacacggcgccatcgattactggggccagggcaccctggtcaccgtctcctca

SEQ ID NO: 982 - protein, 107 aa, Artificial Sequence; identical to SEQ ID NO: 946
  PM07E5-L

SEQ ID NO: 983 - protein, 11 aa, Artificial Sequence
  PM07E5-LCDR1
RASQNVDTNVA

SEQ ID NO: 984 - protein, 7 aa, Artificial Sequence
  PM07E5-LCDR2
SATYRYS

SEQ ID NO: 985 - protein, 9 aa, Artificial Sequence
  PM07E5-LCDR3
QQYNSYPYT

SEQ ID NO: 986 - DNA, 321 bp, Artificial Sequence; identical to SEQ ID NO: 950
  PM07E5-L

SEQ ID NO: 987 - protein, 243 aa, Artificial Sequence
  PM07E5-HL
QVQLVESGGGLVKPGGSLRLSCAASGFTFSDYYMSWVRQAPGKGLEWVASISDGGSNTYYSDIIKGRFTISRDNAKNNLYLQMNSLRAEDTAVYYCARGFPLLRHGAIDYWGQGTLVTVSSGGGGSGGGGSGGGGSDIQMTQSPSSLSASVGDRVTITCRASQNVDTNVAWYQQKPGQAPKSLIYSATYRYSDVPSRFSGSASGTDFTLTISSVQSEDFATYYCQQYNSYPYTFGGGTKLEIK

SEQ ID NO: 988 - DNA, 729 bp, Artificial Sequence
  PM07E5-HL
caggtgcagctggtcgagtctggcggcggactggtgaagcctggcgggtccctgaggctgtcctgtgccgcctccggcttcaccttctccgactactacatgagctgggtccgccaggcccctgggaaggggctggaatgggtggcctccatctccgacggcggctccaacacctactactccgacatcatcaagggccggttcaccatctcccgagacaacgccaagaacaatctgtacctgcagatgaactccctgagggccgaggacaccgccgtgtactactgcgcccggggcttccctctgctgagacacggcgccatcgattactggggccagggcaccctggtcaccgtctcctcaggtggtggtggttctggcggcggcggctccggtggtggtggttctgacatccagatgacccagtcccccagctccctgtccgcctccgtgggcgacagagtgaccatcacctgcagggcctcccagaacgtggacaccaacgtggcctggtatcagcagaagcccggccaggcccctaagtccctgatctactccgccacctaccggtactctgacgtgccttcccggttctccggctccgcgtccggcaccgacttcaccctgaccatctccagcgtgcagtctgaggacttcgccacgtactactgccagcagtacaactcctacccttacaccttcggcggagggaccaagctggaaatcaag

SEQ ID NO: 989 - protein, 498 aa, Artificial Sequence
  PM07E5 HL X I2C HL
QVQLVESGGGLVKPGGSLRLSCAASGFTFSDYYMSWVRQAPGKGLEWVASISDGGSNTYYSDIIKGRFTISRDNAKNNLYLQMNSLRAEDTAVYYCARGFPLLRHGAIDYWGQGTLVTVSSGGGGSGGGGSGGGGSDIQMTQSPSSLSASVGDRVTITCRASQNVDTNVAWYQQKPGQAPKSLIYSATYRYSDVPSRFSGSASGTDFTLTISSVQSEDFATYYCQQYNSYPYTFGGGTKLEIKSGGGGSEVQLVESGGGLVQPGGSLKLSCAASGFTFNKYAMNWVRQAPGKGLEWVARIRSKYNNYATYYADSVKDRFTISRDDSKNTAYLQMNNLKTEDTAVYYCVRHGNFGNSYISYWAYWGQGTLVTVSSGGGGSGGGGSGGGGSQTVVTQEPSLTVSPGGTVTLTCGSSTGAVTSGNYPNWVQQKPGQAPRGLIGGTKFLAPGTPARFSGSLLGGKAALTLSGVQPEDEAEYYCVLWYSNRWVFGGGTKLTVL

SEQ ID NO: 990 - DNA, 1494 bp, Artificial Sequence
  PM07E5 HL X I2C HL
caggtgcagctggtcgagtctggcggcggactggtgaagcctggcgggtccctgaggctgtcctgtgccgcctccggcttcaccttctccgactactacatgagctgggtccgccaggcccctgggaaggggctggaatgggtggcctccatctccgacggcggctccaacacctactactccgacatcatcaagggccggttcaccatctcccgagacaacgccaagaacaatctgtacctgcagatgaactccctgagggccgaggacaccgccgtgtactactgcgcccggggcttccctctgctgagacacggcgccatcgattactggggccagggcaccctggtcaccgtctcctcaggtggtggtggttctggcggcggcggctccggtggtggtggttctgacatccagatgacccagtcccccagctccctgtccgcctccgtgggcgacagagtgaccatcacctgcagggcctcccagaacgtggacaccaacgtggcctggtatcagcagaagcccggccaggcccctaagtccctgatctactccgccacctaccggtactctgacgtgccttcccggttctccggctccgcgtccggcaccgacttcaccctgaccatctccagcgtgcagtctgaggacttcgccacgtactactgccagcagtacaactcctacccttacaccttcggcggagggaccaagctggaaatcaagtccggaggtggtggatccgaggtgcagctggtcgagtctggaggaggattggtgcagcctggagggtcattgaaactctcatgtgcagcctctggattcaccttcaataagtacgccatgaactgggtccgccaggctccaggaaagggtttggaatgggttgctcgcataagaagtaaatataataattatgcaacatattatgccgattcagtgaaagacaggttcaccatctccagagatgattcaaaaaacactgcctatctacaaatgaacaacttgaaaactgaggacactgccgtgtactactgtgtgagacatgggaacttcggtaatagctacatatcctactgggcttactggggccaagggactctggtcaccgtctcctcaggtggtggtggttctggcggcggcggctccggtggtggtggttctcagactgttgtgactcaggaaccttcactcaccgtatcacctggtggaacagtcacactcacttgtggctcctcgactggggctgttacatctggcaactacccaaactgggtccaacaaaaaccaggtcaggcaccccgtggtctaataggtgggactaagttcctcgcccccggtactcctgccagattctcaggctccctgcttggaggcaaggctgccctcaccctctcaggggtacagccagaggatgaggcagaatattactgtgttctatggtacagcaaccgctgggtgttcggtggaggaaccaaactgactgtccta

SEQ ID NO: 991 - protein, 121 aa, Artificial Sequence
  PM07D3-H
QVQLVESGGGLVKPGESLRLSCAASGFTFSDYYMSWVRQAPGKGLEWVASISDGGSNTYYSDIIKGRFTISRDNAKNSLYLQMNSLKAEDTAVYYCARGFPLLRHGAIDYWGQGTLVTVSS

SEQ ID NO: 992 - protein, 5 aa, Artificial Sequence
  PM07D3-HCDR1
DYYMS

SEQ ID NO: 993 - protein, 17 aa, Artificial Sequence
  PM07D3-HCDR2
SISDGGSNTYYSDIIKG

SEQ ID NO: 994 - protein, 12 aa, Artificial Sequence
  PM07D3-HCDR3
GFPLLRHGAIDY

SEQ ID NO: 995 - DNA, 363 bp, Artificial Sequence
  PM07D3-H
caggtgcagctggtcgagtctggcggcggactggtgaagcctggcgagtccctgaggctgtcctgtgccgcctccggcttcaccttctccgactactacatgagctgggtccgccaggcccctgggaaggggctggaatgggtggcctccatctccgacggcggctccaacacctactactccgacatcatcaagggccggttcaccatctcccgagacaacgccaagaacagcctgtacctgcagatgaactccctgaaggccgaggacaccgccgtgtactactgcgcccggggcttccctctgctgagacacggcgccatcgattactggggccagggcaccctggtcaccgtctcctca

SEQ ID NO: 996 - protein, 107 aa, Artificial Sequence; identical to SEQ ID NO: 946
  PM07D3-L

SEQ ID NO: 997 - protein, 11 aa, Artificial Sequence
  PM07D3-LCDR1
RASQNVDTNVA

SEQ ID NO: 998 - protein, 7 aa, Artificial Sequence
  PM07D3-LCDR2
SATYRYS

SEQ ID NO: 999 - protein, 9 aa, Artificial Sequence
  PM07D3-LCDR3
QQYNSYPYT

SEQ ID NO: 1000 - DNA, 321 bp, Artificial Sequence; identical to SEQ ID NO: 950
  PM07D3-L

SEQ ID NO: 1001 - protein, 243 aa, Artificial Sequence
  PM07D3-HL
QVQLVESGGGLVKPGESLRLSCAASGFTFSDYYMSWVRQAPGKGLEWVASISDGGSNTYYSDIIKGRFTISRDNAKNSLYLQMNSLKAEDTAVYYCARGFPLLRHGAIDYWGQGTLVTVSSGGGGSGGGGSGGGGSDIQMTQSPSSLSASVGDRVTITCRASQNVDTNVAWYQQKPGQAPKSLIYSATYRYSDVPSRFSGSASGTDFTLTISSVQSEDFATYYCQQYNSYPYTFGGGTKLEIK

SEQ ID NO: 1002 - DNA, 729 bp, Artificial Sequence
  PM07D3-HL
caggtgcagctggtcgagtctggcggcggactggtgaagcctggcgagtccctgaggctgtcctgtgccgcctccggcttcaccttctccgactactacatgagctgggtccgccaggcccctgggaaggggctggaatgggtggcctccatctccgacggcggctccaacacctactactccgacatcatcaagggccggttcaccatctcccgagacaacgccaagaacagcctgtacctgcagatgaactccctgaaggccgaggacaccgccgtgtactactgcgcccggggcttccctctgctgagacacggcgccatcgattactggggccagggcaccctggtcaccgtctcctcaggtggtggtggttctggcggcggcggctccggtggtggtggttctgacatccagatgacccagtcccccagctccctgtccgcctccgtgggcgacagagtgaccatcacctgcagggcctcccagaacgtggacaccaacgtggcctggtatcagcagaagcccggccaggcccctaagtccctgatctactccgccacctaccggtactctgacgtgccttcccggttctccggctccgcgtccggcaccgacttcaccctgaccatctccagcgtgcagtctgaggacttcgccacgtactactgccagcagtacaactcctacccttacaccttcggcggagggaccaagctggaaatcaag

SEQ ID NO: 1003 - protein, 498 aa, Artificial Sequence
  PM07D3 HL X I2C HL
QVQLVESGGGLVKPGESLRLSCAASGFTFSDYYMSWVRQAPGKGLEWVASISDGGSNTYYSDIIKGRFTISRDNAKNSLYLQMNSLKAEDTAVYYCARGFPLLRHGAIDYWGQGTLVTVSSGGGGSGGGGSGGGGSDIQMTQSPSSLSASVGDRVTITCRASQNVDTNVAWYQQKPGQAPKSLIYSATYRYSDVPSRFSGSASGTDFTLTISSVQSEDFATYYCQQYNSYPYTFGGGTKLEIKSGGGGSEVQLVESGGGLVQPGGSLKLSCAASGFTFNKYAMNWVRQAPGKGLEWVARIRSKYNNYATYYADSVKDRFTISRDDSKNTAYLQMNNLKTEDTAVYYCVRHGNFGNSYISYWAYWGQGTLVTVSSGGGGSGGGGSGGGGSQTVVTQEPSLTVSPGGTVTLTCGSSTGAVTSGNYPNWVQQKPGQAPRGLIGGTKFLAPGTPARFSGSLLGGKAALTLSGVQPEDEAEYYCVLWYSNRWVFGGGTKLTVL

SEQ ID NO: 1004 - DNA, 1494 bp, Artificial Sequence
  PM07D3 HL X I2C HL
caggtgcagctggtcgagtctggcggcggactggtgaagcctggcgagtccctgaggctgtcctgtgccgcctccggcttcaccttctccgactactacatgagctgggtccgccaggcccctgggaaggggctggaatgggtggcctccatctccgacggcggctccaacacctactactccgacatcatcaagggccggttcaccatctcccgagacaacgccaagaacagcctgtacctgcagatgaactccctgaaggccgaggacaccgccgtgtactactgcgcccggggcttccctctgctgagacacggcgccatcgattactggggccagggcaccctggtcaccgtctcctcaggtggtggtggttctggcggcggcggctccggtggtggtggttctgacatccagatgacccagtcccccagctccctgtccgcctccgtgggcgacagagtgaccatcacctgcagggcctcccagaacgtggacaccaacgtggcctggtatcagcagaagcccggccaggcccctaagtccctgatctactccgccacctaccggtactctgacgtgccttcccggttctccggctccgcgtccggcaccgacttcaccctgaccatctccagcgtgcagtctgaggacttcgccacgtactactgccagcagtacaactcctacccttacaccttcggcggagggaccaagctggaaatcaagtccggaggtggtggatccgaggtgcagctggtcgagtctggaggaggattggtgcagcctggagggtcattgaaactctcatgtgcagcctctggattcaccttcaataagtacgccatgaactgggtccgccaggctccaggaaagggtttggaatgggttgctcgcataagaagtaaatataataattatgcaacatattatgccgattcagtgaaagacaggttcaccatctccagagatgattcaaaaaacactgcctatctacaaatgaacaacttgaaaactgaggacactgccgtgtactactgtgtgagacatgggaacttcggtaatagctacatatcctactgggcttactggggccaagggactctggtcaccgtctcctcaggtggtggtggttctggcggcggcggctccggtggtggtggttctcagactgttgtgactcaggaaccttcactcaccgtatcacctggtggaacagtcacactcacttgtggctcctcgactggggctgttacatctggcaactacccaaactgggtccaacaaaaaccaggtcaggcaccccgtggtctaataggtgggactaagttcctcgcccccggtactcctgccagattctcaggctccctgcttggaggcaaggctgccctcaccctctcaggggtacagccagaggatgaggcagaatattactgtgttctatggtacagcaaccgctgggtgttcggtggaggaaccaaactgactgtccta

SEQ ID NO: 1005 - protein, 118 aa, Artificial Sequence
  PM26C9-H
QVQLVQSGPEVVKPGASVKVSCKASGYTFTGYVMHWVRQTPGQRLEWIGYINPYNDVTRYNGKFKGRVTITSDKSSSTAYMELSSLRSEDTAVYYCARGENWYYFDSWGRGTLVTVSS

SEQ ID NO: 1006 - protein, 5 aa, Artificial Sequence
  PM26C9-HCDR1
GYVMH

SEQ ID NO: 1007 - protein, 17 aa, Artificial Sequence
  PM26C9-HCDR2
YINPYNDVTRYNGKFKG

SEQ ID NO: 1008 - protein, 9 aa, Artificial Sequence
  PM26C9-HCDR3
GENWYYFDS

SEQ ID NO: 1009 - DNA, 354 bp, Artificial Sequence
  PM26C9-H
caggtgcagctggtccagtccggccctgaggtggtgaagcctggcgcctccgtgaaggtgtcctgcaaggcctccggctacaccttcaccggctacgtgatgcactgggtgagacagacacccggccagcggctggaatggatcggctacatcaacccttacaacgacgtgacccggtacaacggcaagttcaagggcagagtcaccattaccagcgacaagtcctcctccaccgcctacatggaactgtccagcctgaggtctgaggacaccgccgtgtactactgcgccaggggcgagaactggtactacttcgactcctggggcagaggcactctggtcaccgtctcctcc

SEQ ID NO: 1010 - protein, 111 aa, Artificial Sequence
  PM26C9-L
DVVMTQSPLSLAVTLGQPASISCRASESIDSYDNTFMHWYQQRPGQSPSLLIYRASILQSGVPDRFSGSGSGTDFTLKISRVEAEDVGVYYCHQSIEDPYTFGGGTKLEIK

SEQ ID NO: 1011 - protein, 15 aa, Artificial Sequence
  PM26C9-LCDR1
RASESIDSYDNTFMH

SEQ ID NO: 1012 - protein, 7 aa, Artificial Sequence
  PM26C9-LCDR2
RASILQS

SEQ ID NO: 1013 - protein, 9 aa, Artificial Sequence
  PM26C9-LCDR3
HQSIEDPYT

SEQ ID NO: 1014 - DNA, 333 bp, Artificial Sequence
  PM26C9-L
gacgtcgtgatgacccagtctccactctccctggctgtgactctgggccagccggcctccatctcttgccgggcctccgagtccatcgactcctacgacaacaccttcatgcactggtatcagcagaggcctggccagtctcctagcctgctgatctaccgggcctctatcctgcaatccggcgtccctgaccggttctccggctctggctccggtaccgacttcaccctgaaaatctcccgtgtggaggccgaggacgtgggcgtctactactgccaccagtccatcgaggacccttacaccttcggcggagggaccaagctggaaatcaag

SEQ ID NO: 1015 - protein, 244 aa, Artificial Sequence
  PM26C9-LH
DVVMTQSPLSLAVTLGQPASISCRASESIDSYDNTFMHWYQQRPGQSPSLLIYRASILQSGVPDRFSGSGSGTDFTLKISRVEAEDVGVYYCHQSIEDPYTFGGGTKLEIKGGGGSGGGGSGGGGSQVQLVQSGPEVVKPGASVKVSCKASGYTFTGYVMHWVRQTPGQRLEWIGYINPYNDVTRYNGKFKGRVTITSDKSSSTAYMELSSLRSEDTAVYYCARGENWYYFDSWGRGTLVTVSS

SEQ ID NO: 1016 - DNA, 732 bp, Artificial Sequence
  PM26C9-LH
gacgtcgtgatgacccagtctccactctccctggctgtgactctgggccagccggcctccatctcttgccgggcctccgagtccatcgactcctacgacaacaccttcatgcactggtatcagcagaggcctggccagtctcctagcctgctgatctaccgggcctctatcctgcaatccggcgtccctgaccggttctccggctctggctccggtaccgacttcaccctgaaaatctcccgtgtggaggccgaggacgtgggcgtctactactgccaccagtccatcgaggacccttacaccttcggcggagggaccaagctggaaatcaagggtggtggtggttctggcggcggcggctccggtggtggtggttctcaggtgcagctggtccagtccggccctgaggtggtgaagcctggcgcctccgtgaaggtgtcctgcaaggcctccggctacaccttcaccggctacgtgatgcactgggtgagacagacacccggccagcggctggaatggatcggctacatcaacccttacaacgacgtgacccggtacaacggcaagttcaagggcagagtcaccattaccagcgacaagtcctcctccaccgcctacatggaactgtccagcctgaggtctgaggacaccgccgtgtactactgcgccaggggcgagaactggtactacttcgactcctggggcagaggcactctggtcaccgtctcctcc

SEQ ID NO: 1017 - protein, 498 aa, Artificial Sequence
  PM26C9 LH X I2C HL
DVVMTQSPLSLAVTLGQPASISCRASESIDSYDNTFMHWYQQRPGQSPSLLIYRASILQSGVPDRFSGSGSGTDFTLKISRVEAEDVGVYYCHQSIEDPYTFGGGTKLEIKGGGGSGGGGSGGGGSQVQLVQSGPEVVKPGASVKVSCKASGYTFTGYVMHWVRQTPGQRLEWIGYINPYNDVTRYNGKFKGRVTITSDKSSSTAYMELSSLRSEDTAVYYCARGENWYYFDSWGRGTLVTVSSGGGGSEVQLVESGGGLVQPGGSLKLSCAASGFTFNKYAMNWVRQAPGKGLEWVARIRSKYNNYATYYADSVKDRFTISRDDSKNTAYLQMNNLKTEDTAVYYCVRHGNFGNSYISYWAYWGQGTLVTVSSGGGGSGGGGSGGGGSQTVVTQEPSLTVSPGGTVTLTCGSSTGAVTSGNYPNWVQQKPGQAPRGLIGGTKFLAPGTPARFSGSLLGGKAALTLSGVQPEDEAEYYCVLWYSNRWVFGGGTKLTVL

SEQ ID NO: 1018 - DNA, 1494 bp, Artificial Sequence
  PM26C9 LH X I2C HL
gacgtcgtgatgacccagtctccactctccctggctgtgactctgggccagccggcctccatctcttgccgggcctccgagtccatcgactcctacgacaacaccttcatgcactggtatcagcagaggcctggccagtctcctagcctgctgatctaccgggcctctatcctgcaatccggcgtccctgaccggttctccggctctggctccggtaccgacttcaccctgaaaatctcccgtgtggaggccgaggacgtgggcgtctactactgccaccagtccatcgaggacccttacaccttcggcggagggaccaagctggaaatcaagggtggtggtggttctggcggcggcggctccggtggtggtggttctcaggtgcagctggtccagtccggccctgaggtggtgaagcctggcgcctccgtgaaggtgtcctgcaaggcctccggctacaccttcaccggctacgtgatgcactgggtgagacagacacccggccagcggctggaatggatcggctacatcaacccttacaacgacgtgacccggtacaacggcaagttcaagggcagagtcaccattaccagcgacaagtcctcctccaccgcctacatggaactgtccagcctgaggtctgaggacaccgccgtgtactactgcgccaggggcgagaactggtactacttcgactcctggggcagaggcactctggtcaccgtctcctccggaggtggtggatccgaggtgcagctggtcgagtctggaggaggattggtgcagcctggagggtcattgaaactctcatgtgcagcctctggattcaccttcaataagtacgccatgaactgggtccgccaggctccaggaaagggtttggaatgggttgctcgcataagaagtaaatataataattatgcaacatattatgccgattcagtgaaagacaggttcaccatctccagagatgattcaaaaaacactgcctatctacaaatgaacaacttgaaaactgaggacactgccgtgtactactgtgtgagacatgggaacttcggtaatagctacatatcctactgggcttactggggccaagggactctggtcaccgtctcctcaggtggtggtggttctggcggcggcggctccggtggtggtggttctcagactgttgtgactcaggaaccttcactcaccgtatcacctggtggaacagtcacactcacttgtggctcctcgactggggctgttacatctggcaactacccaaactgggtccaacaaaaaccaggtcaggcaccccgtggtctaataggtgggactaagttcctcgcccccggtactcctgccagattctcaggctccctgcttggaggcaaggctgccctcaccctctcaggggtacagccagaggatgaggcagaatattactgtgttctatggtacagcaaccgctgggtgttcggtggaggaaccaaactgactgtccta

SEQ ID NO: 1019 - protein, 118 aa, Artificial Sequence
  PM26H4-H
QVQLVQSGPEVVKPGASVKVSCKASGYTFTGYVLHWVKQTPGQRLEWIGYINPYNDVTRYNGKFKGRVTITSDTSASTAYMELSGLTSEDTAVYYCARGENWYYFDSWGRGTLVTVSS

SEQ ID NO: 1020 - protein, 5 aa, Artificial Sequence
  PM26H4-HCDR1
GYVLH

SEQ ID NO: 1021 - protein, 17 aa, Artificial Sequence
  PM26H4-HCDR2
YINPYNDVTRYNGKFKG

SEQ ID NO: 1022 - protein, 9 aa, Artificial Sequence
  PM26H4-HCDR3
GENWYYFDS

SEQ ID NO: 1023 - DNA, 354 bp, Artificial Sequence
  PM26H4-H
caggtgcagctggtccagtccggccctgaggtggtgaagcctggcgcctccgtgaaggtgtcctgcaaggcctccggctacaccttcaccggctacgtgctgcactgggtgaaacagacacccggccagcggctggaatggatcggctacatcaacccttacaacgacgtgacccggtacaacggcaagttcaagggcagagtcaccattaccagcgacacgtccgcctccaccgcctacatggaactgtccggcctgacgtctgaggacaccgccgtgtattactgcgccaggggcgagaactggtactacttcgactcctggggcagaggcactctggtcaccgtctcctcc

SEQ ID NO: 1024 - protein, 111 aa, Artificial Sequence
  PM26H4-L
DVVMTQSPLSLAVTLGQRASISCRASESIDSYGNTFMHWYQQRPGQSPRLLIYRASILESGVPARFSGSGSGTDFTLAISRVEAEDVGVYYCHQSIEDPYTFGGGTKLEIK

SEQ ID NO: 1025 - protein, 15 aa, Artificial Sequence
  PM26H4-LCDR1
RASESIDSYGNTFMH

SEQ ID NO: 1026 - protein, 7 aa, Artificial Sequence
  PM26H4-LCDR2
RASILES

SEQ ID NO: 1027 - protein, 9 aa, Artificial Sequence
  PM26H4-LCDR3
HQSIEDPYT

SEQ ID NO: 1028 - DNA, 333 bp, Artificial Sequence
  PM26H4-L
gacgtcgtgatgacccagtctccactctccctggctgtgactctgggccagcgggcctccatctcttgccgggcctccgagtccatcgactcctacggcaacaccttcatgcactggtatcagcagaggcctggccagtctcctcgcctgctgatctaccgggcctctatcctggaatccggcgtccctgcccggttctccggctctggctccggcaccgacttcaccctggcaatctcccgtgtggaggccgaggacgtgggcgtctactactgccaccagtccatcgaggacccttacaccttcggcggagggaccaagctggaaatcaag

SEQ ID NO: 1029 - protein, 244 aa, Artificial Sequence
  PM26H4-LH
DVVMTQSPLSLAVTLGQRASISCRASESIDSYGNTFMHWYQQRPGQSPRLLIYRASILESGVPARFSGSGSGTDFTLAISRVEAEDVGVYYCHQSIEDPYTFGGGTKLEIKGGGGSGGGGSGGGGSQVQLVQSGPEVVKPGASVKVSCKASGYTFTGYVLHWVKQTPGQRLEWIGYINPYNDVTRYNGKFKGRVTITSDTSASTAYMELSGLTSEDTAVYYCARGENWYYFDSWGRGTLVTVSS

SEQ ID NO: 1030 - DNA, 732 bp, Artificial Sequence
  PM26H4-LH
gacgtcgtgatgacccagtctccactctccctggctgtgactctgggccagcgggcctccatctcttgccgggcctccgagtccatcgactcctacggcaacaccttcatgcactggtatcagcagaggcctggccagtctcctcgcctgctgatctaccgggcctctatcctggaatccggcgtccctgcccggttctccggctctggctccggcaccgacttcaccctggcaatctcccgtgtggaggccgaggacgtgggcgtctactactgccaccagtccatcgaggacccttacaccttcggcggagggaccaagctggaaatcaagggtggtggtggttctggcggcggcggctccggtggtggtggttctcaggtgcagctggtccagtccggccctgaggtggtgaagcctggcgcctccgtgaaggtgtcctgcaaggcctccggctacaccttcaccggctacgtgctgcactgggtgaaacagacacccggccagcggctggaatggatcggctacatcaacccttacaacgacgtgacccggtacaacggcaagttcaagggcagagtcaccattaccagcgacacgtccgcctccaccgcctacatggaactgtccggcctgacgtctgaggacaccgccgtgtattactgcgccaggggcgagaactggtactacttcgactcctggggcagaggcactctggtcaccgtctcctcc

SEQ ID NO: 1031 - protein, 499 aa, Artificial Sequence
  PM26H4 LH X I2C HL
DVVMTQSPLSLAVTLGQRASISCRASESIDSYGNTFMHWYQQRPGQSPRLLIYRASILESGVPARFSGSGSGTDFTLAISRVEAEDVGVYYCHQSIEDPYTFGGGTKLEIKGGGGSGGGGSGGGGSQVQLVQSGPEVVKPGASVKVSCKASGYTFTGYVLHWVKQTPGQRLEWIGYINPYNDVTRYNGKFKGRVTITSDTSASTAYMELSGLTSEDTAVYYCARGENWYYFDSWGRGTLVTVSSSGGGGSEVQLVESGGGLVQPGGSLKLSCAASGFTFNKYAMNWVRQAPGKGLEWVARIRSKYNNYATYYADSVKDRFTISRDDSKNTAYLQMNNLKTEDTAVYYCVRHGNFGNSYISYWAYWGQGTLVTVSSGGGGSGGGGSGGGGSQTVVTQEPSLTVSPGGTVTLTCGSSTGAVTSGNYPNWVQQKPGQAPRGLIGGTKFLAPGTPARFSGSLLGGKAALTLSGVQPEDEAEYYCVLWYSNRWVFGGGTKLTVL

SEQ ID NO: 1032 - DNA, 1494 bp, Artificial Sequence
  PM26H4 LH X I2C HL
gacgtcgtgatgacccagtctccactctccctggctgtgactctgggccagcgggcctccatctcttgccgggcctccgagtccatcgactcctacggcaacaccttcatgcactggtatcagcagaggcctggccagtctcctcgcctgctgatctaccgggcctctatcctggaatccggcgtccctgcccggttctccggctctggctccggcaccgacttcaccctggcaatctcccgtgtggaggccgaggacgtgggcgtctactactgccaccagtccatcgaggacccttacaccttcggcggagggaccaagctggaaatcaagggtggtggtggttctggcggcggcggctccggtggtggtggttctcaggtgcagctggtccagtccggccctgaggtggtgaagcctggcgcctccgtgaaggtgtcctgcaaggcctccggctacaccttcaccggctacgtgctgcactgggtgaaacagacacccggccagcggctggaatggatcggctacatcaacccttacaacgacgtgacccggtacaacggcaagttcaagggcagagtcaccattaccagcgacacgtccgcctccaccgcctacatggaactgtccggcctgacgtctgaggacaccgccgtgtattactgcgccaggggcgagaactggtactacttcgactcctggggcagaggcactctggtcaccgtctcctccggaggtggtggatccgaggtgcagctggtcgagtctggaggaggattggtgcagcctggagggtcattgaaactctcatgtgcagcctctggattcaccttcaataagtacgccatgaactgggtccgccaggctccaggaaagggtttggaatgggttgctcgcataagaagtaaatataataattatgcaacatattatgccgattcagtgaaagacaggttcaccatctccagagatgattcaaaaaacactgcctatctacaaatgaacaacttgaaaactgaggacactgccgtgtactactgtgtgagacatgggaacttcggtaatagctacatatcctactgggcttactggggccaagggactctggtcaccgtctcctcaggtggtggtggttctggcggcggcggctccggtggtggtggttctcagactgttgtgactcaggaaccttcactcaccgtatcacctggtggaacagtcacactcacttgtggctcctcgactggggctgttacatctggcaactacccaaactgggtccaacaaaaaccaggtcaggcaccccgtggtctaataggtgggactaagttcctcgcccccggtactcctgccagattctcaggctccctgcttggaggcaaggctgccctcaccctctcaggggtacagccagaggatgaggcagaatattactgtgttctatggtacagcaaccgctgggtgttcggtggaggaaccaaactgactgtccta

SEQ ID NO: 1033 - DNA, 2283 bp, Artificial Sequence
  huPSMArat140-169
atgtggaatctgcttcacgaaacagactcggctgtcgccaccgcgcggcgcccgcggtggctgtgcgccggggcgctggtcctggcgggtggattctttctcctgggcttcctctttgggtggtttatcaaatcctccaacgaagctactaatattactccaaaacataatatgaaggcatttttggacgaattgaaagccgagaacatcaaaaagttcttatacaattttacccagataccacacttagcaggaaccgaacaaaacttccagcttgcaaaacaaattcaatctcagtggaaagagtttggcctggactctgttgagctggcacattatgacgtcctgttgtcttacccaaataaaactcatcccaattacatctcaatcattaatgaagacggaaatgagatcttcaaaacatcattagctgaactgtcacccccgggatatgagaacatatcagatgtagtgccaccatacagtgccttctctccacaagggacacccgagggggacctagtgtatgtgaactatgcacggactgaagacttttttaaattggagcgggacatgaagatcaattgctccgggaaaattgtgattgccagatacgggaaagtttttagaggaaataaagttaaaaatgctcagctggcaggcgccaaaggagtgattctctactctgaccctgctgattactttgctcccggggtgaagtcatatccagatggctggaatcttcccggaggtggtgtgcagcgtggaaacatcctaaatctcaatggtgcaggcgaccctctcaccccaggttaccccgcaaatgaatacgcttataggcggggaattgcagaagctgttggtctgccaagtattccagttcatccaatcggatactatgacgcacagaagctgctagaaaagatgggtggctccgcaccaccagacagcagctggaggggaagtctcaaggtgccctacaacgttggacctggatttactggaaatttttctacacagaaagtcaaaatgcacatccattctaccaatgaggtgacaagaatctacaatgtgatcggtactctcaggggagcagtggagccagacaggtatgtcattctcggaggtcaccgcgactcatgggtctttggtggtatcgaccctcagagcggagcagctgtggttcatgaaatcgtgaggagcttcggaacactgaagaaggaaggctggagacctaggagaacaatcttgtttgcaagttgggatgcagaggaatttggtctgcttggttctaccgagtgggcagaagagaactcaagactcctgcaagagcgtggagtggcttatatcaatgctgactcctctatagaaggcaactacaccctgagagttgactgtacacccctgatgtacagtttggtacacaatctaacaaaagaactgaaaagccccgatgaaggcttcgaaggcaaatccctttatgaaagctggactaaaaagagtccttcccctgagttcagtggaatgcccaggatcagcaaattgggctctggaaatgactttgaggtgtttttccaacgactgggaattgcttccggcagagcacgctatactaaaaactgggaaacaaataaattcagtggctatcccctgtatcacagcgtctatgaaacctatgagttggtcgaaaagttttacgatccaatgttcaaatatcacctgactgtggctcaggttcgaggcgggatggtgttcgagctagccaactccatagtgctgccttttgattgccgagattatgccgtagttttaaggaagtatgctgataaaatctacagcatttctatgaagcatccacaggagatgaagacatatagtgtatcattcgattcacttttctctgcagtgaagaattttaccgaaattgcttctaagtttagtgagaggctccaggacttcgacaaaagcaatccaatagtattgagaatgatgaacgatcaactgatgtttctggagagagcatttatcgatccattaggcttaccagaccgccctttttatagacatgtcatctacgctccaagcagtcacaacaagtacgcaggggagtccttcccaggaatctatgatgccctgtttgacattgaaagcaaggtggacccttctaaggcctggggcgaagtgaagaggcagatttatgtggcagccttcaccgtgcaggcagccgcagagaccttgagtgaggtagcctccggggattacaaggacgacgatgacaagtaa

SEQ ID NO: 1034 - protein, 760 aa, Artificial Sequence
  huPSMArat140-169
MWNLLHETDSAVATARRPRWLCAGALVLAGGFFLLGFLFGWFIKSSNEATNITPKHNMKAFLDELKAENIKKFLYNFTQIPHLAGTEQNFQLAKQIQSQWKEFGLDSVELAHYDVLLSYPNKTHPNYISIINEDGNEIFKTSLAELSPPGYENISDVVPPYSAFSPQGTPEGDLVYVNYARTEDFFKLERDMKINCSGKIVIARYGKVFRGNKVKNAQLAGAKGVILYSDPADYFAPGVKSYPDGWNLPGGGVQRGNILNLNGAGDPLTPGYPANEYAYRRGIAEAVGLPSIPVHPIGYYDAQKLLEKMGGSAPPDSSWRGSLKVPYNVGPGFTGNFSTQKVKMHIHSTNEVTRIYNVIGTLRGAVEPDRYVILGGHRDSWVFGGIDPQSGAAVVHEIVRSFGTLKKEGWRPRRTILFASWDAEEFGLLGSTEWAEENSRLLQERGVAYINADSSIEGNYTLRVDCTPLMYSLVHNLTKELKSPDEGFEGKSLYESWTKKSPSPEFSGMPRISKLGSGNDFEVFFQRLGIASGRARYTKNWETNKFSGYPLYHSVYETYELVEKFYDPMFKYHLTVAQVRGGMVFELANSIVLPFDCRDYAVVLRKYADKIYSISMKHPQEMKTYSVSFDSLFSAVKNFTEIASKFSERLQDFDKSNPIVLRMMNDQLMFLERAFIDPLGLPDRPFYRHVIYAPSSHNKYAGESFPGIYDALFDIESKVDPSKAWGEVKRQIYVAAFTVQAAAETLSEVASGDYKDDDDK

SEQ ID NO: 1035 - DNA, 2283 bp, Artificial Sequence
  huPSMArat191-258
atgtggaatctgcttcacgaaacagactcggctgtcgccaccgcgcggcgcccgcggtggctgtgcgccggggcgctggtcctggcgggtggattctttctcctgggcttcctctttgggtggtttatcaaatcctccaacgaagctactaatattactccaaaacataatatgaaggcatttttggacgaattgaaagccgagaacatcaaaaagttcttatacaattttacccagataccacacttagcaggaaccgaacaaaacttccagcttgcaaaacaaattcaatctcagtggaaagagtttggcctggactctgttgagctggcacattatgacgtcctgttgtcttacccaaataaaactcatcccaattacatctcaatcattaatgaagacggaaatgagatcttcaacacatccttatttgaaccccctcctccaggctatgaaaatgtgtcggatattgtgccacctttcagcgctttctctccccaaggaatgcccgagggcgacctagtgtatgtgaactatgcgcgcactgaagacttttttaaattggagcgggtcatgaagatcaattgttctgggaagattgtcatcgccagatatggccaagtgttcagaggaaacaaggttaaaaacgctcagctggcaggtgcaaaaggaatcattctgtactcagaccctgctgattactttgttcctggcgtgaagtcctacccagatggctggaacctccctggaggtggcgttcagcgtggaaacgtcctaaatctcaatggtgcaggcgacccgttaaccccaggttaccccgcaaatgaatacgcttataggcggggaattgcagaagctgttggtctgccaagtattccagttcatccaatcggatactatgacgcacagaagctgctagaaaagatgggtggctccgcaccaccagacagcagctggaggggaagcttgaaggtgccctacaacgttggacctggatttactggaaatttttctacacagaaagtcaaaatgcacatccattctaccaatgaggtgacaagaatctacaatgtgatcggtactctcaggggagcagtggagccagacaggtatgtcattctcggaggtcaccgcgactcatgggtctttggtggtatcgaccctcagagcggagcagctgtggttcatgaaatcgtgaggagcttcggaacactgaagaaggaaggctggagacctaggagaacaatcttgtttgcaagttgggatgcagaggaatttggtctgcttggttctaccgagtgggcagaagagaactcaagactcctgcaagagcgtggagtggcttatatcaatgctgactcctctatagaaggcaactacaccctgagagttgactgtacacccctgatgtacagtttggtacacaatctaacaaaagaactgaaaagccccgatgaaggcttcgaaggcaaatccctttatgaaagctggactaaaaagagtccttcccctgagttcagtggaatgcccaggatcagcaaattgggctctggaaatgactttgaggtgtttttccaacgactgggaattgcttccggcagagcacgctatactaaaaactgggaaacaaataaattcagtggctatcccctgtatcacagcgtctatgaaacctatgagttggtcgaaaagttttacgatccaatgttcaaatatcacctgactgtggctcaggttcgaggcgggatggtgttcgagctagccaactccatagtgctgccttttgattgccgagattatgccgtagttttaaggaagtatgctgataaaatctacagcatttctatgaagcatccacaggagatgaagacatatagtgtatcattcgattcacttttctctgcagtgaagaattttaccgaaattgcttctaagtttagtgagaggctccaggacttcgacaaaagcaatccaatagtattgagaatgatgaacgatcaactgatgtttctggagagagcatttatcgatccattaggcttaccagaccgccctttttatagacatgtcatctacgctccaagcagtcacaacaagtacgcaggggagtccttcccaggaatctatgatgccctgtttgacattgaaagcaaggtggacccttctaaggcctggggcgaagtgaagaggcagatttatgtggcagccttcaccgtgcaggcagccgcagagaccttgagtgaggtagcctccggggattacaaggacgacgatgacaagtaa

SEQ ID NO: 1036 - protein, 760 aa, Artificial Sequence
  huPSMArat191-258
MWNLLHETDSAVATARRPRWLCAGALVLAGGFFLLGFLFGWFIKSSNEATNITPKHNMKAFLDELKAENIKKFLYNFTQIPHLAGTEQNFQLAKQIQSQWKEFGLDSVELAHYDVLLSYPNKTHPNYISIINEDGNEIFNTSLFEPPPPGYENVSDIVPPFSAFSPQGMPEGDLVYVNYARTEDFFKLERVMKINCSGKIVIARYGQVFRGNKVKNAQLAGAKGIILYSDPADYFVPGVKSYPDGWNLPGGGVQRGNVLNLNGAGDPLTPGYPANEYAYRRGIAEAVGLPSIPVHPIGYYDAQKLLEKMGGSAPPDSSWRGSLKVPYNVGPGFTGNFSTQKVKMHIHSTNEVTRIYNVIGTLRGAVEPDRYVILGGHRDSWVFGGIDPQSGAAVVHEIVRSFGTLKKEGWRPRRTILFASWDAEEFGLLGSTEWAEENSRLLQERGVAYINADSSIEGNYTLRVDCTPLMYSLVHNLTKELKSPDEGFEGKSLYESWTKKSPSPEFSGMPRISKLGSGNDFEVFFQRLGIASGRARYTKNWETNKFSGYPLYHSVYETYELVEKFYDPMFKYHLTVAQVRGGMVFELANSIVLPFDCRDYAVVLRKYADKIYSISMKHPQEMKTYSVSFDSLFSAVKNFTEIASKFSERLQDFDKSNPIVLRMMNDQLMFLERAFIDPLGLPDRPFYRHVIYAPSSHNKYAGESFPGIYDALFDIESKVDPSKAWGEVKRQIYVAAFTVQAAAETLSEVASGDYKDDDDK

SEQ ID NO: 1037 - DNA, 2283 bp, Artificial Sequence
  huPSMArat281-284
atgtggaatctgcttcacgaaacagactcggctgtcgccaccgcgcggcgcccgcggtggctgtgcgccggggcgctggtcctggcgggtggattctttctcctgggcttcctctttgggtggtttatcaaatcctccaacgaagctactaatattactccaaaacataatatgaaggcatttttggacgaattgaaagccgagaacatcaaaaagttcttatacaattttacccagataccacacttagcaggaaccgaacaaaacttccagcttgcaaaacaaattcaatctcagtggaaagagtttggcctggactctgttgagctggcacattatgacgtcctgttgtcttacccaaataaaactcatcccaattacatctcaatcattaatgaagacggaaatgagatcttcaacacatccttatttgaaccccctcctccaggctatgaaaatgtgtcggatattgtgccacctttcagcgctttctctccccaaggaatgcccgagggcgacctagtgtatgtgaactatgcacggactgaagacttttttaaattggagcgggacatgaagatcaattgctccgggaaaattgtgattgccagatacgggaaagtttttagaggaaataaagttaaaaatgctcagctggcaggcgccaaaggagtgattctctactctgaccctgctgattactttgctcccggggtgaagtcatatccagatggctggaatcttcccggaggtggtgtgcagcgtggaaacatcctaaatctcaatggtgcaggcgacccgttaaccccaggttaccccgcaaatgaatacgcttataggcatgagttcacagaagctgttggtctgccaagtattccagttcatccaatcggatactatgacgcacagaagctgctagaaaagatgggtggctccgcaccaccagacagcagctggaggggaagcttgaaggtgccctacaacgttggacctggatttactggaaatttttctacacagaaagtcaaaatgcacatccattctaccaatgaggtgacaagaatctacaatgtgatcggtactctcaggggagcagtggagccagaccggtatgtcattctcggaggtcaccgcgactcatgggtctttggtggtatcgaccctcagagcggagcagctgtggttcatgaaatcgtgaggagcttcggaacactgaagaaggaaggctggagacctaggagaacaatcttgtttgcaagttgggatgcagaggaatttggtctgcttggttctaccgagtgggcagaagagaactcaagactcctgcaagagcgtggagtggcttatatcaatgctgactcctctatagaaggcaactacaccctgagagttgactgtacacccctgatgtacagtttggtacacaatctaacaaaagaactgaaaagccccgatgaaggcttcgaaggcaaatccctttatgaaagctggactaaaaagagtccttcccctgagttcagtggaatgcccaggatcagcaaattgggctctggaaatgactttgaggtgtttttccaacgactgggaattgcttccggcagagcacgctatactaaaaactgggaaacaaataaattcagtggctatcccctgtatcacagcgtctatgaaacctatgagttggtcgaaaagttttacgatccaatgttcaaatatcacctgactgtggctcaggttcgaggcgggatggtgttcgagctagccaactccatagtgctgccttttgattgccgagattatgccgtagttttaaggaagtatgctgataaaatctacagcatttctatgaagcatccacaggagatgaagacatatagtgtatcattcgattcacttttctctgcagtgaagaattttaccgaaattgcttctaagtttagtgagaggctccaggacttcgacaaaagcaatccaatagtattgagaatgatgaacgatcaactgatgtttctggagagagcatttatcgatccattaggcttaccagaccgccctttttatagacatgtcatctacgctccaagcagtcacaacaagtacgcaggggagtccttcccaggaatctatgatgccctgtttgacattgaaagcaaggtggacccttctaaggcctggggcgaagtgaagaggcagatttatgtggcagccttcaccgtgcaggcagccgcagagaccttgagtgaggtagcctccggggattacaaggacgacgatgacaagtaa

SEQ ID NO: 1038 - protein, 760 aa, Artificial Sequence
  huPSMArat281-284
MWNLLHETDSAVATARRPRWLCAGALVLAGGFFLLGFLFGWFIKSSNEATNITPKHNMKAFLDELKAENIKKFLYNFTQIPHLAGTEQNFQLAKQIQSQWKEFGLDSVELAHYDVLLSYPNKTHPNYISIINEDGNEIFNTSLFEPPPPGYENVSDIVPPFSAFSPQGMPEGDLVYVNYARTEDFFKLERDMKINCSGKIVIARYGKVFRGNKVKNAQLAGAKGVILYSDPADYFAPGVKSYPDGWNLPGGGVQRGNILNLNGAGDPLTPGYPANEYAYRHEFTEAVGLPSIPVHPIGYYDAQKLLEKMGGSAPPDSSWRGSLKVPYNVGPGFTGNFSTQKVKMHIHSTNEVTRIYNVIGTLRGAVEPDRYVILGGHRDSWVFGGIDPQSGAAVVHEIVRSFGTLKKEGWRPRRTILFASWDAEEFGLLGSTEWAEENSRLLQERGVAYINADSSIEGNYTLRVDCTPLMYSLVHNLTKELKSPDEGFEGKSLYESWTKKSPSPEFSGMPRISKLGSGNDFEVFFQRLGIASGRARYTKNWETNKFSGYPLYHSVYETYELVEKFYDPMFKYHLTVAQVRGGMVFELANSIVLPFDCRDYAVVLRKYADKIYSISMKHPQEMKTYSVSFDSLFSAVKNFTEIASKFSERLQDFDKSNPIVLRMMNDQLMFLERAFIDPLGLPDRPFYRHVIYAPSSHNKYAGESFPGIYDALFDIESKVDPSKAWGEVKRQIYVAAFTVQAAAETLSEVASGDYKDDDDK

SEQ ID NO: 1039 - DNA, 2283 bp, Artificial Sequence
  huPSMArat300-344
atgtggaatctgcttcacgaaacagactcggctgtcgccaccgcgcggcgcccgcggtggctgtgcgccggggcgctggtcctggcgggtggattctttctcctgggcttcctctttgggtggtttatcaaatcctccaacgaagctactaatattactccaaaacataatatgaaggcatttttggacgaattgaaagccgagaacatcaaaaagttcttatacaattttacccagataccacacttagcaggaaccgaacaaaacttccagcttgcaaaacaaattcaatctcagtggaaagagtttggcctggactctgttgagctggcacattatgacgtcctgttgtcttacccaaataaaactcatcccaattacatctcaatcattaatgaagacggaaatgagatcttcaacacatccttatttgaaccccctcctccaggctatgaaaatgtgtcggatattgtgccacctttcagcgctttctctccccaaggaatgcccgagggcgacctagtgtatgtgaactatgcacggactgaagacttttttaaattggagcgggacatgaagatcaattgctccgggaaaattgtgattgccagatacgggaaagtttttagaggaaataaagttaaaaatgctcagctggcaggcgccaaaggagtgattctctactctgaccctgctgattactttgctcccggggtgaagtcatatccagatggctggaatcttcccggaggtggtgtgcagcgtggaaacatcctaaatctcaatggtgcaggcgacccgttaaccccaggttaccccgcaaatgaatacgcttataggcggggaattgcagaagctgttggtctgccaagtattccagttcatccaatcggatacgatgatgcccagaaactattagaacatatgggtggctccgcaccccctgacagcagctggaagggaggactaaaagtgccttacaacgtgggacctggcttcgctggaaacttctcaaaacaaaaggtcaagctgcacatccattctaccaatgaggtgacaagaatctacaatgtgatcggtactctcaggggagcagtggagccagaccggtatgtcattctcggaggtcaccgcgactcatgggtctttggtggtatcgaccctcagagcggagcagctgtggttcatgaaatcgtgaggagcttcggaacactgaagaaggaaggctggagacctaggagaacaatcttgtttgcaagttgggatgcagaggaatttggtctgcttggttctaccgagtgggcagaagagaactcaagactcctgcaagagcgtggagtggcttatatcaatgctgactcctctatagaaggcaactacaccctgagagttgactgtacacccctgatgtacagtttggtacacaatctaacaaaagaactgaaaagccccgatgaaggcttcgaaggcaaatccctttatgaaagctggactaaaaagagtccttcccctgagttcagtggaatgcccaggatcagcaaattgggctctggaaatgactttgaggtgtttttccaacgactgggaattgcttccggcagagcacgctatactaaaaactgggaaacaaataaattcagtggctatcccctgtatcacagcgtctatgaaacctatgagttggtcgaaaagttttacgatccaatgttcaaatatcacctgactgtggctcaggttcgaggcgggatggtgttcgagctagccaactccatagtgctgccttttgattgccgagattatgccgtagttttaaggaagtatgctgataaaatctacagcatttctatgaagcatccacaggagatgaagacatatagtgtatcattcgattcacttttctctgcagtgaagaattttaccgaaattgcttctaagtttagtgagaggctccaggacttcgacaaaagcaatccaatagtattgagaatgatgaacgatcaactgatgtttctggagagagcatttatcgatccattaggcttaccagaccgccctttttatagacatgtcatctacgctccaagcagtcacaacaagtacgcaggggagtccttcccaggaatctatgatgccctgtttgacattgaaagcaaggtggacccttctaaggcctggggcgaagtgaagaggcagatttatgtggcagccttcaccgtgcaggcagccgcagagaccttgagtgaggtagcctccggggattacaaggacgacgatgacaagtaa

SEQ ID NO: 1040 - protein, 760 aa, Artificial Sequence
  huPSMArat300-344
MWNLLHETDSAVATARRPRWLCAGALVLAGGFFLLGFLFGWFIKSSNEATNITPKHNMKAFLDELKAENIKKFLYNFTQIPHLAGTEQNFQLAKQIQSQWKEFGLDSVELAHYDVLLSYPNKTHPNYISIINEDGNEIFNTSLFEPPPPGYENVSDIVPPFSAFSPQGMPEGDLVYVNYARTEDFFKLERDMKINCSGKIVIARYGKVFRGNKVKNAQLAGAKGVILYSDPADYFAPGVKSYPDGWNLPGGGVQRGNILNLNGAGDPLTPGYPANEYAYRRGIAEAVGLPSIPVHPIGYDDAQKLLEHMGGSAPPDSSWKGGLKVPYNVGPGFAGNFSKQKVKLHIHSTNEVTRIYNVIGTLRGAVEPDRYVILGGHRDSWVFGGIDPQSGAAVVHEIVRSFGTLKKEGWRPRRTILFASWDAEEFGLLGSTEWAEENSRLLQERGVAYINADSSIEGNYTLRVDCTPLMYSLVHNLTKELKSPDEGFEGKSLYESWTKKSPSPEFSGMPRISKLGSGNDFEVFFQRLGIASGRARYTKNWETNKFSGYPLYHSVYETYELVEKFYDPMFKYHLTVAQVRGGMVFELANSIVLPFDCRDYAVVLRKYADKIYSISMKHPQEMKTYSVSFDSLFSAVKNFTEIASKFSERLQDFDKSNPIVLRMMNDQLMFLERAFIDPLGLPDRPFYRHVIYAPSSHNKYAGESFPGIYDALFDIESKVDPSKAWGEVKRQIYVAAFTVQAAAETLSEVASGDYKDDDDK

SEQ ID NO: 1041 - DNA, 2283 bp, Artificial Sequence
  huPSMArat598-617
atgtggaatctgcttcacgaaacagactcggctgtcgccaccgcgcggcgcccgcggtggctgtgcgccggggcgctggtcctggcgggtggattctttctcctgggcttcctctttgggtggtttatcaaatcctccaacgaagctactaatattactccaaaacataatatgaaggcatttttggacgaattgaaagccgagaacatcaaaaagttcttatacaattttacccagataccacacttagcaggaaccgaacaaaacttccagcttgcaaaacaaattcaatctcagtggaaagagtttggcctggactctgttgagctggcacattatgacgtcctgttgtcttacccaaataaaactcatcccaattacatctcaatcattaatgaagacggaaatgagatcttcaacacatccttatttgaaccccctcctccaggctatgaaaatgtgtcggatattgtgccacctttcagcgctttctctccccaaggaatgcccgagggcgacctagtgtatgtgaactatgcacggactgaagacttttttaaattggagcgggacatgaagatcaattgctccgggaaaattgtgattgccagatacgggaaagtttttagaggaaataaagttaaaaatgctcagctggcaggcgccaaaggagtgattctctactctgaccctgctgattactttgctcccggggtgaagtcatatccagatggctggaatcttcccggaggtggtgtgcagcgtggaaacatcctaaatctcaatggtgcaggcgaccctctcaccccaggttaccccgcaaatgaatacgcttataggcggggaattgcagaagctgttggtctgccaagtattccagttcatccaatcggatactatgacgcacagaagctgctagaaaagatgggtggctccgcaccaccagacagcagctggaggggaagtctcaaggtgccctacaacgttggacctggatttactggaaatttttctacacagaaagtcaaaatgcacatccattctaccaatgaggtgacaagaatctacaatgtgatcggtactctcaggggagcagtggagccagacaggtatgtcattctcggaggtcaccgcgactcatgggtctttggtggtatcgaccctcagagcggagcagctgtggttcatgaaatcgtgaggagcttcggaacactgaagaaggaaggctggagacctaggagaacaatcttgtttgcaagttgggatgcagaggaatttggtctgcttggttctaccgagtgggcagaagagaactcaagactcctgcaagagcgtggagtggcttatatcaatgctgactcctctatagaaggcaactacaccctgagagttgactgtacacccctgatgtacagtttggtacacaatctaacaaaagaactgaaaagccccgatgaaggcttcgaaggcaaatccctttatgaaagctggactaaaaagagtccttcccctgagttcagtggaatgcccaggatcagcaaattgggctctggaaatgactttgaggtgtttttccaacgactgggaattgcttccggcagagcacgctatactaaaaactgggaaacaaataaattcagtggctatcccctgtatcacagcgtctatgaaacctatgagttggtcgaaaagttttacgatccaatgttcaaatatcacctgactgtggctcaggttcgaggcgggatggtgttcgagctcgccaactccatagtgctgccttttgattgccaaagttatgctgtagctctgaagaaacatgctgagactatctacaacatttcaatgaatcatccacaggagatgaagacatatagtgtaagcttcgattcacttttctctgcagtgaagaattttaccgaaattgcttctaagtttagtgagaggctccaggacttcgacaaaagcaatccaatagtattgagaatgatgaacgatcaactgatgtttctggagagagcatttatcgatccattaggcttaccagaccgccctttttatagacatgtcatctacgctccaagcagtcacaacaagtacgcaggggagtccttcccaggaatctatgacgcgttgtttgacattgaaagcaaggtggacccttctaaggcctggggcgaagtgaagaggcagatttatgtggcagccttcaccgtgcaggcagccgcagagaccttgagtgaggtagcctccggggattacaaggacgacgatgacaagtaa

SEQ ID NO: 1042 - protein, 760 aa, Artificial Sequence
  huPSMArat598-617
MWNLLHETDSAVATARRPRWLCAGALVLAGGFFLLGFLFGWFIKSSNEATNITPKHNMKAFLDELKAENIKKFLYNFTQIPHLAGTEQNFQLAKQIQSQWKEFGLDSVELAHYDVLLSYPNKTHPNYISIINEDGNEIFNTSLFEPPPPGYENVSDIVPPFSAFSPQGMPEGDLVYVNYARTEDFFKLERDMKINCSGKIVIARYGKVFRGNKVKNAQLAGAKGVILYSDPADYFAPGVKSYPDGWNLPGGGVQRGNILNLNGAGDPLTPGYPANEYAYRRGIAEAVGLPSIPVHPIGYYDAQKLLEKMGGSAPPDSSWRGSLKVPYNVGPGFTGNFSTQKVKMHIHSTNEVTRIYNVIGTLRGAVEPDRYVILGGHRDSWVFGGIDPQSGAAVVHEIVRSFGTLKKEGWRPRRTILFASWDAEEFGLLGSTEWAEENSRLLQERGVAYINADSSIEGNYTLRVDCTPLMYSLVHNLTKELKSPDEGFEGKSLYESWTKKSPSPEFSGMPRISKLGSGNDFEVFFQRLGIASGRARYTKNWETNKFSGYPLYHSVYETYELVEKFYDPMFKYHLTVAQVRGGMVFELANSIVLPFDCQSYAVALKKHAETIYNISMNHPQEMKTYSVSFDSLFSAVKNFTEIASKFSERLQDFDKSNPIVLRMMNDQLMFLERAFIDPLGLPDRPFYRHVIYAPSSHNKYAGESFPGIYDALFDIESKVDPSKAWGEVKRQIYVAAFTVQAAAETLSEVASGDYKDDDDK

SEQ ID NO: 1043 - DNA, 2283 bp, Artificial Sequence
  huPSMArat683-690
atgtggaatctgcttcacgaaacagactcggctgtcgccaccgcgcggcgcccgcggtggctgtgcgccggggcgctggtcctggcgggtggattctttctcctgggcttcctctttgggtggtttatcaaatcctccaacgaagctactaatattactccaaaacataatatgaaggcatttttggacgaattgaaagccgagaacatcaaaaagttcttatacaattttacccagataccacacttagcaggaaccgaacaaaacttccagcttgcaaaacaaattcaatctcagtggaaagagtttggcctggactctgttgagctggcacattatgacgtcctgttgtcttacccaaataaaactcatcccaattacatctcaatcattaatgaagacggaaatgagatcttcaacacatccttatttgaaccccctcctccaggctatgaaaatgtgtcggatattgtgccacctttcagcgctttctctccccaaggaatgcccgagggcgacctagtgtatgtgaactatgcacggactgaagacttttttaaattggagcgggacatgaagatcaattgctccgggaaaattgtgattgccagatacgggaaagtttttagaggaaataaagttaaaaatgctcagctggcaggcgccaaaggagtgattctctactctgaccctgctgattactttgctcccggggtgaagtcatatccagatggctggaatcttcccggaggtggtgtgcagcgtggaaacatcctaaatctcaatggtgcaggcgaccctctcaccccaggttaccccgcaaatgaatacgcttataggcggggaattgcagaagctgttggtctgccaagtattccagttcatccaatcggatactatgacgcacagaagctgctagaaaagatgggtggctccgcaccaccagacagcagctggaggggaagtctcaaggtgccctacaacgttggacctggatttactggaaatttttctacacagaaagtcaaaatgcacatccattctaccaatgaggtgacaagaatctacaatgtgatcggtactctcaggggagcagtggagccagacaggtatgtcattctcggaggtcaccgcgactcatgggtctttggtggtatcgaccctcagagcggagcagctgtggttcatgaaatcgtgaggagcttcggaacactgaagaaggaaggctggagacctaggagaacaatcttgtttgcaagttgggatgcagaggaatttggtctgcttggttctaccgagtgggcagaagagaactcaagactcctgcaagagcgtggagtggcttatatcaatgctgactcctctatagaaggcaactacaccctgagagttgactgtacacccctgatgtacagtttggtacacaatctaacaaaagaactgaaaagccccgatgaaggcttcgaaggcaaatccctttatgaaagctggactaaaaagagtccttcccctgagttcagtggaatgcccaggatcagcaaattgggctctggaaatgactttgaggtgtttttccaacgactgggaattgcttccggcagagcacgctatactaaaaactgggaaacaaataaattcagtggctatcccctgtatcacagcgtctatgaaacctatgagttggtcgaaaagttttacgatccaatgttcaaatatcacctgactgtggctcaggttcgaggcgggatggtgttcgagctcgccaactccatagtgctgccttttgattgccgagattatgccgtagttttaaggaagtatgctgataaaatctacagcatttctatgaagcatccacaggagatgaagacatatagtgtatcattcgattcacttttctctgcagtgaagaattttaccgaaattgcttctaagtttagtgagaggctccaggacttcgacaaaagcaatccaatagtattgagaatgatgaacgatcaactgatgtttctggagcgcgcatttatcgatccattaggcttaccaggaaggcctttctacaggcatatcatctacgctccaagcagtcacaacaagtacgcaggggagtccttcccaggaatctatgacgcgttgtttgacattgaaagcaaggtggacccttctaaggcctggggcgaagtgaagaggcagatttatgtggcagccttcaccgtgcaggcagccgcagagaccttgagtgaggtagcctccggggattacaaggacgacgatgacaagtaa

SEQ ID NO: 1044 - protein, 760 aa, Artificial Sequence
  huPSMArat683-690
MWNLLHETDSAVATARRPRWLCAGALVLAGGFFLLGFLFGWFIKSSNEATNITPKHNMKAFLDELKAENIKKFLYNFTQIPHLAGTEQNFQLAKQIQSQWKEFGLDSVELAHYDVLLSYPNKTHPNYISIINEDGNEIFNTSLFEPPPPGYENVSDIVPPFSAFSPQGMPEGDLVYVNYARTEDFFKLERDMKINCSGKIVIARYGKVFRGNKVKNAQLAGAKGVILYSDPADYFAPGVKSYPDGWNLPGGGVQRGNILNLNGAGDPLTPGYPANEYAYRRGIAEAVGLPSIPVHPIGYYDAQKLLEKMGGSAPPDSSWRGSLKVPYNVGPGFTGNFSTQKVKMHIHSTNEVTRIYNVIGTLRGAVEPDRYVILGGHRDSWVFGGIDPQSGAAVVHEIVRSFGTLKKEGWRPRRTILFASWDAEEFGLLGSTEWAEENSRLLQERGVAYINADSSIEGNYTLRVDCTPLMYSLVHNLTKELKSPDEGFEGKSLYESWTKKSPSPEFSGMPRISKLGSGNDFEVFFQRLGIASGRARYTKNWETNKFSGYPLYHSVYETYELVEKFYDPMFKYHLTVAQVRGGMVFELANSIVLPFDCRDYAVVLRKYADKIYSISMKHPQEMKTYSVSFDSLFSAVKNFTEIASKFSERLQDFDKSNPIVLRMMNDQLMFLERAFIDPLGLPGRPFYRHIIYAPSSHNKYAGESFPGIYDALFDIESKVDPSKAWGEVKRQIYVAAFTVQAAAETLSEVASGDYKDDDDK

SEQ ID NO: 1045 - DNA, 2283 bp, Artificial Sequence
  huPSMArat716-750
atgtggaatctgcttcacgaaacagactcggctgtcgccaccgcgcggcgcccgcggtggctgtgcgccggggcgctggtcctggcgggtggattctttctcctgggcttcctctttgggtggtttatcaaatcctccaacgaagctactaatattactccaaaacataatatgaaggcatttttggacgaattgaaagccgagaacatcaaaaagttcttatacaattttacccagataccacacttagcaggaaccgaacaaaacttccagcttgcaaaacaaattcaatctcagtggaaagagtttggcctggactctgttgagctggcacattatgacgtcctgttgtcttacccaaataaaactcatcccaattacatctcaatcattaatgaagacggaaatgagatcttcaacacatccttatttgaaccccctcctccaggctatgaaaatgtgtcggatattgtgccacctttcagcgctttctctccccaaggaatgcccgagggcgacctagtgtatgtgaactatgcacggactgaagacttttttaaattggagcgggacatgaagatcaattgctccgggaaaattgtgattgccagatacgggaaagtttttagaggaaataaagttaaaaatgctcagctggcaggcgccaaaggagtgattctctactctgaccctgctgattactttgctcccggggtgaagtcatatccagatggctggaatcttcccggaggtggtgtgcagcgtggaaacatcctaaatctcaatggtgcaggcgaccctctcaccccaggttaccccgcaaatgaatacgcttataggcggggaattgcagaagctgttggtctgccaagtattccagttcatccaatcggatactatgacgcacagaagctgctagaaaagatgggtggctccgcaccaccagacagcagctggaggggaagtctcaaggtgccctacaacgttggacctggatttactggaaatttttctacacagaaagtcaaaatgcacatccattctaccaatgaggtgacaagaatctacaatgtgatcggtactctcaggggagcagtggagccagacaggtatgtcattctcggaggtcaccgcgactcatgggtctttggtggtatcgaccctcagagcggagcagctgtggttcatgaaatcgtgaggagcttcggaacactgaagaaggaaggctggagacctaggagaacaatcttgtttgcaagttgggatgcagaggaatttggtctgcttggttctaccgagtgggcagaagagaactcaagactcctgcaagagcgtggagtggcttatatcaatgctgactcctctatagaaggcaactacaccctgagagttgactgtacacccctgatgtacagtttggtacacaatctaacaaaagaactgaaaagccccgatgaaggcttcgaaggcaaatccctttatgaaagctggactaaaaagagtccttcccctgagttcagtggaatgcccaggatcagcaaattgggctctggaaatgactttgaggtgtttttccaacgactgggaattgcttccggcagagcacgctatactaaaaactgggaaacaaataaattcagtggctatcccctgtatcacagcgtctatgaaacctatgagttggtcgaaaagttttacgatccaatgttcaaatatcacctgactgtggctcaggttcgaggcgggatggtgttcgagctcgccaactccatagtgctgccttttgattgccgagattatgccgtagttttaaggaagtatgctgataaaatctacagcatttctatgaagcatccacaggagatgaagacatatagtgtatcattcgattcacttttctctgcagtgaagaattttaccgaaattgcttctaagtttagtgagaggctccaggacttcgacaaaagcaatccaatagtattgagaatgatgaacgatcaactgatgtttctggagcgcgcatttatcgatccattaggcttaccagaccgccctttttatagacatgtcatctacgctccaagcagtcacaacaagtacgcaggggagtccttcccaggaatctatgacgcgttgtttgacattaataacaaagtcgatacttctaaggcctggagagaagtgaaaagacagatttctattgcagcctttacagtgcaagctgcagcagagactctgagagaagtagactccggggattacaaggacgacgatgacaagtaa

SEQ ID NO: 1046 - protein, 760 aa, Artificial Sequence
  huPSMArat716-750
MWNLLHETDSAVATARRPRWLCAGALVLAGGFFLLGFLFGWFIKSSNEATNITPKHNMKAFLDELKAENIKKFLYNFTQIPHLAGTEQNFQLAKQIQSQWKEFGLDSVELAHYDVLLSYPNKTHPNYISIINEDGNEIFNTSLFEPPPPGYENVSDIVPPFSAFSPQGMPEGDLVYVNYARTEDFFKLERDMKINCSGKIVIARYGKVFRGNKVKNAQLAGAKGVILYSDPADYFAPGVKSYPDGWNLPGGGVQRGNILNLNGAGDPLTPGYPANEYAYRRGIAEAVGLPSIPVHPIGYYDAQKLLEKMGGSAPPDSSWRGSLKVPYNVGPGFTGNFSTQKVKMHIHSTNEVTRIYNVIGTLRGAVEPDRYVILGGHRDSWVFGGIDPQSGAAVVHEIVRSFGTLKKEGWRPRRTILFASWDAEEFGLLGSTEWAEENSRLLQERGVAYINADSSIEGNYTLRVDCTPLMYSLVHNLTKELKSPDEGFEGKSLYESWTKKSPSPEFSGMPRISKLGSGNDFEVFFQRLGIASGRARYTKNWETNKFSGYPLYHSVYETYELVEKFYDPMFKYHLTVAQVRGGMVFELANSIVLPFDCRDYAVVLRKYADKIYSISMKHPQEMKTYSVSFDSLFSAVKNFTEIASKFSERLQDFDKSNPIVLRMMNDQLMFLERAFIDPLGLPDRPFYRHVIYAPSSHNKYAGESFPGIYDALFDINNKVDTSKAWREVKRQISIAAFTVQAAAETLREVDSGDYKDDDDK

SEQ ID NO: 1047 - protein, 27 aa, Macaca fascicularis
QDGNEEMGSITQTPYQVSISGTTILTC

SEQ ID NO: 1048 - protein, 27 aa, Macaca fascicularis
QDGNEEMGSITQTPYQVSISGTTVILT

SEQ ID NO: 1049 - protein, 27 aa, Macaca mulatta
QDGNEEMGSITQTPYHVSISGTTVILT
